(19) United States
(12) Patent Application Publication
(10) Pub. No.: US 2024/0156960 A1
(43) Pub. Date: May 16, 2024

(54) SYSTEMS AND METHODS FOR EXPRESSING BIOMOLECULES IN A SUBJECT

(71) Applicant: DNARx, San Francisco, CA (US)

(72) Inventors: Robert DEBS, San Francisco, CA (US); Chakkrapong HANDUMRONGKUL, Richmond, VA (US); Timothy HEATH, Madison, WI (US); Alice YE, San Francisco, CA (US)

(73) Assignee: DNARx, San Francisco, CA (US)

(21) Appl. No.: 18/166,962

(22) Filed: Feb. 9, 2023

Related U.S. Application Data
(63) Continuation of application No. PCT/US2021/052040, filed on Sep. 24, 2021.
(60) Provisional application No. 63/083,625, filed on Sep. 25, 2020.

(51) Int. Cl. A61K 39/42; A61K 31/53; A61K 31/573; A61K 39/00; A61K 45/06; A61P 37/04

(52) U.S. Cl. CPC A61K 39/42; A61K 31/53; A61K 31/573; A61K 39/0012; A61K 45/06; A61P 37/04; A61K 2039/505; A61K 2039/53

(57) ABSTRACT

The present invention provides compositions, systems, kits, and methods for expressing at least one therapeutic protein or biologically active nucleic acid molecule in a subject. In certain embodiments, the subject is first administered a composition comprising polycationic structures that is free, or essentially free, of nucleic acid molecules, and then (e.g., 1-30 minutes later) is administered a composition comprising a plurality of one or more non-viral expression vectors that encode at least one therapeutic protein (e.g., at least one anti-SARS-CoV-2 antibody, multiple different antibodies, an ACE2 protein, or human growth hormone) or a biologically active nucleic acid molecule.

[0001] The present application is a continuation application of International Patent Application No. PCT/US2021/052040, filed Sep. 24, 2021, which claims the benefit of U.S. Provisional Application No. 63/083,625, filed Sep. 25, 2020, the disclosure of each of which is herein incorporated by reference in its entirety.

### SEQUENCE LISTING

[0002] This application contains a computer readable Sequence Listing which has been submitted in XML file format via Patent Center, the entire content of which is incorporated by reference herein in its entirety. The Sequence Listing XML file submitted via Patent Center is entitled “14755-006-999_SEQ_LISTING.xml”, was created on Jan. 24, 2023, and is 4,197,897 bytes in size.

### FIELD OF THE INVENTION

[0003] The present invention provides compositions, systems, kits, and methods for expressing at least one therapeutic protein or biologically active nucleic acid molecule in a subject. In certain embodiments, the subject is first administered a composition comprising polycationic structures that is free, or essentially free, of nucleic acid molecules, and then (e.g., 1-30 minutes later) is administered a composition comprising a plurality of one or more non-viral expression vectors that encode at least one therapeutic protein (e.g., at least one anti-SARS-CoV-2 antibody, multiple different antibodies, one anti-SARS-CoV-2 recombinant ACE2 protein, at least one cytokine, or human growth hormone) or a biologically active nucleic acid molecule.

### BACKGROUND

[0004] The simplest non-viral gene delivery system uses naked expression vector DNA. Direct injection of free DNA into certain tissues, particularly muscle, has been shown to produce high levels of gene expression, and the simplicity of this approach has led to its adoption in a number of clinical protocols. In particular, this approach has been applied to the gene therapy of cancer where the DNA can be injected either directly into the tumor or can be injected into muscle cells in order to express tumor antigens that might function as a cancer vaccine.

[0005] Although direct injection of plasmid DNA has been shown to lead to gene expression, the overall level of expression is much lower than with either viral or liposomal vectors. Naked DNA is also generally thought to be unsuitable for systemic administration due to the presence of serum nucleases. As a result, direct injection of plasmid DNA appears to be limited to only a few applications involving tissues that are easily accessible to direct injection such as skin and muscle cells.

### SUMMARY OF THE INVENTION

[0006] The present invention provides compositions, systems, kits, and methods for expressing at least one therapeutic protein or biologically active nucleic acid molecule in a subject. In certain embodiments, the subject is first administered a composition comprising polycationic structures that is free, or essentially free, of nucleic acid molecules, and then (e.g., 1-30 minutes later) is administered a composition comprising a plurality of one or more non-viral expression vectors that encode at least one therapeutic protein (e.g., at least one anti-SARS-CoV-2 antibody, multiple different antibodies, or human growth hormone) or a biologically active nucleic acid molecule. In some embodiments, an agent is further administered (e.g., EPA or DHA) that increases the level and/or length of expression in a subject. In particular embodiments, the first and/or second composition is administered via the subject's airway.

[0007] In some embodiments, provided herein are methods comprising: a) administering a first composition to a subject, wherein the first composition comprises polycationic structures, and wherein the first composition is free, or essentially free, of nucleic acid molecules; and b) administering a second composition to the subject after administering the first composition, wherein the second composition comprises a plurality of one or more non-viral expression vectors that encode at least one anti-SARS-CoV-2 antibody or antigen-binding portion thereof, and/or recombinant ACE2, and wherein, as a result of the administering the first and second compositions, the at least one anti-SARS-CoV-2 antibody, or antigen-binding portion thereof, and/or said recombinant ACE2, is expressed in the subject.

[0008] In certain embodiments, provided herein are systems comprising: a) a first container; b) a first composition inside the first container and comprising polycationic structures, wherein the first composition is free, or essentially free, of nucleic acid molecules; c) a second container; and d) a second composition inside the second container and comprising a plurality of one or more non-viral expression vectors that encode at least one anti-SARS-CoV-2 antibody or antigen-binding portion thereof, or an ACE2 protein.

[0009] In some embodiments, the systems further comprise an Agent that: i) increases the level of expression of the at least one anti-SARS-CoV-2 antibody or antigen-binding portion thereof, or the ACE2 protein, when administered to a subject, and/or ii) and/or the length of time of the expression; as compared to when the agent is not administered to the subject. In further embodiments, the Agent is present in the first composition and/or the second composition. In other embodiments, the systems further comprise: a third container, and wherein the agent is present in the third container.

[0010] In certain embodiments, the systems further comprise an anti-viral agent (e.g., Remdesivir or a protein comprising at least part of the ACE2 receptor) and/or an anti-inflammatory and/or anticoagulant.

[0011] In particular embodiments, wherein: A) the subject is infected with the SARS-CoV-2 virus, and wherein the at least one anti-SARS-CoV-2 antibody, or antigen-binding portion thereof, or recombinant ACE2 is expressed in the subject at an expression level sufficient to reduce: i) the SARS-CoV-2 viral load in the subject, and/or ii) at least one symptom in the subject caused by the SARS-CoV-2 infection; or B) the subject is not infected with the SARS-CoV-2 virus, and wherein the at least one anti-SARS-CoV-2 antibody, or antigen-binding portion thereof, or recombinant ACE2 is expressed in the subject at an expression level sufficient to prevent the subject from being infected by the SARS-CoV-2 virus.

[0012] In certain embodiments, the expression level is maintained in the subject for at least two weeks without: i) any further, or only one, two, or three further repeat, of steps a) and b), and ii) any further administration of vectors encoding the at least one anti-SARS-CoV-2 antibody or antigen-binding portion thereof. In other embodiments, the expression level is maintained in the subject for at least one month without: i) any further, or only one, two, or three further repeat, of steps a) and b), and ii) any further administration of vectors encoding the at least one anti-SARS-CoV-2 antibody or antigen-binding portion thereof. In further embodiments, the expression level is maintained in the subject for at least one year, or two years, or for the lifetime of the subject, without: i) any further, or only one, two, or three further repeat, of steps a) and b), and ii) any further administration of vectors encoding the at least one anti-SARS-CoV-2 antibody or antigen-binding portion thereof. In some embodiments, the at least one anti-SARS-CoV-2 antibody, or antigen-binding portion thereof, is expressed in the subject at a level of: i) between 500 ng/ml and 50 ug/ml, or 10-20 ug/ml, for at least 25 days, or ii) at least 250 ng/ml for at least 25 days.

[0013] In some embodiments, provided herein are methods of simultaneously expressing at least three different antibodies, or antigen binding portions thereof, in a subject comprising: a) administering a first composition to a subject, wherein the first composition comprises polycationic structures, and wherein the first composition is free, or essentially free, of nucleic acid molecules; and b) administering a second composition to the subject after administering the first composition, wherein the second composition comprises a plurality of one or more non-viral expression vectors that encode at least three different antibodies or antigen-binding portions thereof, and wherein, as a result of the administering the first and second compositions, the at least three different antibodies, or antigen-binding portions thereof, are simultaneously expressed in the subject. In certain embodiments, the at least three different antibodies, or antigen binding portions thereof, are specific for SARS-CoV-2 and/or influenza A, and/or influenza B. In some embodiments, the at least three different antibodies, or antigen-binding portions thereof, are each fully or substantially neutralizing for SARS-CoV-2. In other embodiments, the at least three different antibodies, or antigen-binding portions thereof, are each fully or substantially neutralizing for a virus selected from the group consisting of: HIV, influenza A, influenza B, and malaria.

[0014] In certain embodiments, provided herein are systems comprising: a) a first container; b) a first composition inside the first container and comprising polycationic structures, wherein the first composition is free, or essentially free, of nucleic acid molecules; c) a second container; and d) a second composition inside the second container and comprising a plurality of one or more non-viral expression vectors that encode at least three different antibodies or antigen-binding portions thereof. In certain embodiments, the systems further comprise: an agent that: i) increases the level of expression of at least one of the at least three different antibodies or antigen-binding portions thereof when administered to a subject, and/or ii) and/or the length of time of the expression, as compared to when the agent is not administered to the subject. In other embodiments, the agent is present in the first composition and/or the second composition. In additional embodiments, the systems further comprise a third container, and wherein the agent is present in the third container.

[0015] In certain embodiments, the at least three different antibodies or antigen-binding portions thereof, are each expressed in the subject at a level of at least 100 ng/ml (e.g., at least 100 . . . 500 . . . 900 ng/ml). In other embodiments, the at least three different antibodies or antigen-binding portions thereof, are each expressed in the subject at a level of at least 100 ng/ml for at least 25 days. In other embodiments, the at least three different antibodies or antigen-binding portions thereof, are expressed in the subject at a level of at least 200 ng/ml.

[0016] In further embodiments, the at least three different antibodies or antigen-binding portions thereof, are expressed in the subject at a level of at least 200 ng/ml for at least 25 days. In other embodiments, wherein: A) the expression level for each of the three different antibodies, or antigen binding portions thereof, is maintained in the subject for at least two weeks, or at least 3 weeks, without: i) any further, or only one further, repeat of steps a) and b), and ii) any further administration of vectors encoding the at least three different antibodies or antigen binding portions thereof; and/or B)repeating steps a) and b) at least once or at least twice. In particular embodiments, the expression level is maintained in the subject for at least two weeks, or at least 3 weeks, without: i) any further, or only one or two further, repeats of steps a) and b), and ii) any further administration of vectors encoding the at least three different antibodies or antigen binding portions thereof.

[0017] In other embodiments, the one or more non-viral expression vectors comprise three non-viral expression vectors. In further embodiments, each of the three non-viral expression vector encodes a different antibody or antigen binding fragment thereof. In further embodiments, the one or more non-viral expression vectors comprise six non-viral expression vectors. In additional embodiments, each of the six non-viral expression vectors encodes a different antibody light chain variable region, or heavy chain variable region. In further embodiments, the one or more non-viral expression vectors comprise first, second, and third nucleic acid sequences each encoding an antibody light chain variable region, and fourth, fifth, and sixth nucleic acid sequences each encoding an antibody heavy chain variable region. In other embodiments, the antigen-binding portions thereof are selected from the group consisting of: a Fab′, F(ab)2, Fab, and a minibody.

[0018] In some embodiments, at least one of the at least three different antibodies or antigen-binding portions thereof is an anti-SARS-CoV-2 antibody or antigen binding portion thereof. In other embodiments, the at least one of the at least three different antibodies or antigen-binding portions thereof is an antibody or antigen binding portion thereof selected from Table 4 and/or Table 7. In further embodiments, the at least three different antibodies or antigen-binding portions thereof comprise at least four, five, six, seven, or eight different antibodies or antigen-binding portions thereof. In some embodiments, the administering comprises intravenous administering.

[0019] In some embodiments, provided herein are methods comprising: a) administering a first composition to a subject, wherein the first composition comprises polycationic structures, and wherein the first composition is free, or essentially free, of nucleic acid molecules; and b) administering a second composition to the subject after administering the first composition, wherein the second composition comprises a plurality of non-viral expression vectors that encode human growth hormone (hGH) and/or hGH linked to a half-life extending peptide (hGH-ext), and wherein, as a result of the administering the first and second compositions, the hGH is expressed in the subject.

[0020] In particular embodiments, the hGH and/or hGH-ext is expressed in the subject at a serum expression level of at least 1 ng/ml (e.g., at least 1 . . . 10 . . . 100 . . . 500 ng/ml). In other embodiments, the expression level is maintained in the subject for at least two weeks without: i) any further, or only one further repeat, of steps a) and b), and ii) any further administration of vectors encoding the hGH or hGH-ext. In other embodiments, the expression level is maintained in the subject for at least one month without: i) any further, or only one further repeat, of steps a) and b), and ii) any further administration of vectors encoding the hGH or hGH-ext. In additional embodiments, the expression level is maintained in the subject for at least one year without: i) any further, or only one further repeat, of steps a) and b), and ii) any further administration of vectors encoding the hGH or hGH-ext. In further embodiments, the plurality of non-viral expression vectors encode the hGH-ext, and wherein the half-life extending peptide is selected from the group consisting of: an Fc region peptide, serum albumin, carboxy terminal peptide of human chorionic gonadotropin b-subunit (CTP), and XTEN (see, Schellenberger et al., Nat Biotechnol. 2009 December; 27(12):1186-90). In additional embodiments, the methods further comprise: c) administering an agent, in the first and/or second composition, or present in a third composition, wherein the agent: i) increases the level of expression of the hGH and/or hGH-ext, and/or ii) and/or the length of time of the expression compared to when the agent is not administered to the subject.

[0021] In some embodiments, provided herein are systems comprising: a) a first container; b) a first composition inside the first container and comprising polycationic structures, wherein the first composition is free, or essentially free, of nucleic acid molecules; c) a second container; and d) a second composition inside the second container and comprising a plurality of non-viral expression vectors that encode human growth hormone (hGH) and/or hGH linked to a half-life extending peptide (hGH-ext). In certain embodiments, systems further comprise: an Agent that: i) increases the level of expression of the hGH and/or the hGH-ext when administered to a subject, and/or ii) and/or the length of time of the expression; as compared to when the agent is not administered to the subject. In other embodiments, the agent is present in the first composition and/or the second composition. In particular embodiments, the systems further comprise: a third container, and wherein the agent is present in the third container.

[0022] In some embodiments, provided herein are methods comprising: a) administering a first composition to a subject, wherein the first composition comprises polycationic structures, and wherein the first composition is free, or essentially free, of nucleic acid molecules; b) administering a second composition to the subject after administering the first composition, wherein the second composition comprises a plurality of expression vectors that each comprise a first nucleic acid sequence encoding a first protein and/or a first biologically active nucleic acid molecule; and c) administering an agent, in the first and/or second composition, or present in a third composition, wherein the agent: i) increases the level of expression of the first protein or the first biologically active nucleic acid molecule, and/or ii) and/or the length of time of the expression; and/or iii) decreases toxicity as measured by alanine aminotransferase (ALT) levels; all as compared to when the agent is not administered to the subject; wherein the agent is selected from the group consisting of: docosahexaenoic acid (DHA), eicosapenaenoic acid (EPA), alpha Linolenic acid (ALA), lipoxin A4 (LA4), 15-deoxy-12,14-prostaglandin J2 (15d), arachidonic acid (AA), cocosapentaenoic acid (DPA), retinoic acid (RA), diallyl disulfide (DADS), oleic acid (OA), alpha tocopherol (AT), sphingosine-1-phosphate (S-1-P), palmitoyl sphingomyelin (SPH), an anti-TNFa antibody or antigen binding fragment thereof, a heparinoid, and N-Acetyl-De-O-Sulfated Heparin; and wherein, as a result of the administering the first and second compositions and the agent to the subject, the first protein or the first biologically active nucleic acid molecule is expressed in the subject.

[0023] In other embodiments, the first protein or the first biologically active nucleic acid molecule, is expressed in the subject at a serum expression level of at least 10 ng/ml or at least 100 ng/ml. In additional embodiments, the expression level is maintained in the subject for at least two weeks without: i) any further, or only one further repeat, of steps a), b) and c), and ii) any further administration of vectors encoding the first protein or the first biologically active nucleic acid molecule. In further embodiments, the expression level is maintained in the subject for at least one month without: i) any further, or only one further repeat, of steps a), b) and c), and ii) any further administration of vectors encoding the first protein or the first biologically active nucleic acid molecule. In additional embodiments, the expression level is maintained in the subject for at least one year without: i) any further, or only one further repeat, of steps a), b), and c), and ii) any further administration of vectors encoding the first protein or the first biologically active nucleic acid molecule. In other embodiments, the first nucleic acid sequence provides the first protein or the first biologically active nucleic acid molecule, wherein the first biologically active nucleic acid molecule comprises a sequence selected from: an siRNA or shRNA sequence, a miRNA sequence, an antisense sequence, a CRISPR multimerized single guide, and a CRISPR single guide RNA sequence (sgRNA). In other embodiments, each of the expression vectors further comprises a second nucleic acid sequence encoding: i) a second therapeutic protein, and/or ii) a second biologically active nucleic acid molecule.

[0024] In some embodiments, the agent is present in the first composition. In particular embodiments, the agent is present in the third composition, and is administered at least one hour prior to the first composition. In additional embodiments, the agent comprises docosahexaenoic Acid (DHA). In further embodiments, the agent comprises eicosapenaenoic Acid (EPA).

[0025] In additional embodiments, provided herein are systems comprising: a) a first container; b) a first composition inside the first container and comprising polycationic structures, wherein the first composition is free, or essentially free, of nucleic acid molecules; c) a second container; and d) a second composition inside the second container and comprising a plurality of expression vectors that each comprise a first nucleic acid sequence encoding a first protein and/or a first biologically active nucleic acid molecule; and e) an agent in the first and/or second composition, or present in a third composition in a third container, wherein the agent is selected from the group consisting of: docosahexaenoic acid (DHA), eicosapenaenoic acid (EPA), alpha Linolenic acid (ALA), lipoxin A4 (LA4), 15-deoxy-12,14-prostaglandin J2 (15d), arachidonic acid (AA), cocosapentaenoic acid (DPA), retinoic acid (RA), diallyl disulfide (DADS), oleic acid (OA), alpha tocopherol (AT), sphingosine-1-phosphate (S-1-P), palmitoyl sphingomyelin (SPH), an anti-TNFa antibody or antigen binding fragment thereof, a heparinoid, and N-Acetyl-De-O-Sulfated Heparin.

[0026] In further embodiments, the agent, when administered to a subject with the first and second compositions: i) increases the level of expression of the first protein or the first biologically active nucleic acid molecule, and/or ii) and/or the length of time of the expression; and/or iii) decreases toxicity as measured by alanine aminotransferase (ALT) levels; all as compared to when the agent is not administered to the subject. In other embodiments, the agent is present in the first composition and/or the second composition. In further embodiments, the systems further comprise said third container, and wherein the agent is present in the third container.

[0027] In some embodiments, provided herein are methods comprising: a) administering a first composition to a subject via the subject's airway, wherein the first composition comprises polycationic structures, and wherein the first composition is free, or essentially free, of nucleic acid molecules; and b) administering a second composition to the subject after administering the first composition, wherein the administering is via the subject's airway, and wherein the second composition comprises a plurality of expression vectors that each comprise a first nucleic acid sequence encoding a first protein and/or a first biologically active nucleic acid molecule; and wherein, as a result of the administering the first and second compositions to the subject, the first protein or the first biologically active nucleic acid molecule is expressed in the subject.

[0028] In certain embodiments, the first protein or the first biologically active nucleic acid molecule is expressed in the subject's lungs. In further embodiments, the first composition is an aqueous composition or a freeze-dried composition. In other embodiments, the second composition is an aqueous composition or a freeze-dried composition. In additional embodiments, the polycationic structure comprise lipids selected from the group consisting of: 1,2-dioleoyl-3-trimethylammonium-propane (DOTAP); 1,2-Dimyristoyl-sn-glycero-3-phosphocholine (DMPC); 1,2-dioleoyl-sn-glycero-3-phospho-L-serine (DOPS); and 1-stearoyl-2-oleoyl-sn-glycero-3-phospho-L-serine. In other embodiments, the subject has lung inflammation. In further embodiments, the subject is on a ventilator.

[0029] In additional embodiments, provided herein are systems comprising: a) a first container; b) a first composition inside the first container and comprising polycationic structures, wherein the first composition is free, or essentially free, of nucleic acid molecules, and wherein the polycationic structure comprise lipids selected from the group consisting of: 1,2-dioleoyl-sn-glycero-3-phospho-L-serine (DOPS); and 1-stearoyl-2-oleoyl-sn-glycero-3-phospho-L-serine; c) a second container; and d) a second composition inside the second container and comprising a plurality of expression vectors that each comprise a first nucleic acid sequence encoding a first protein and/or a first biologically active nucleic acid molecule.

[0030] In some embodiments, provided herein are systems comprising: a) a first container; b) a first composition inside the first container and comprising polycationic structures, wherein the first composition is free, or essentially free, of nucleic acid molecules; c) a second container; and d) a second composition inside the second container and comprising a plurality of expression vectors that each comprise a first nucleic acid sequence encoding a first protein and/or a first biologically active nucleic acid molecule, wherein the first and/or second composition is a freeze-dried composition.

[0031] In some embodiments, provided herein are methods of treating a subject comprising: administering a composition to a subject, wherein the composition comprises: i) an emulsion and/or plurality of liposomes, and ii) an Agent, wherein the subject has: inflammation, an autoimmune disease, an immune-deficiency disease, SARS-CoV-2 infection, and/or is receiving a checkpoint inhibitor, and wherein the Agent selected from the group consisting of: dexamethasone, dexamethasone palmitate, a dexamethasone fatty acid ester, docosahexaenoic Acid (DHA), eicosapenaenoic Acid (EPA), alpha Linolenic Acid (ALA), lipoxin A4 (LA4), 15-deoxy-12,14-Prostaglandin J2 (15d), arachidonic acid (AA), docosapentaenoic acid (DPA), retinoic Acid (RA), diallyl disulfide (DADS), oleic acid (OA), alpha tocopherol (AT), sphingosine-1-phosphate (S-1-P), palmitoyl sphingomyelin (SPH), an anti-TNFa antibody or antigen binding fragment thereof, a heparinoid, and N-Acetyl-De-O-sulfated heparin. In further embodiments, the administration comprises airway administration. In other embodiments, the administration comprises systemic administration. In other embodiments, the composition comprises the liposomes, and wherein Agent is incorporated into the liposomes. In other embodiments, the composition further comprises one or more of the Agents not in the liposomes. In additional embodiments, the composition is free, or essentially free, or nucleic acid molecules. In other embodiments, the subject is infected with SARS-CoV-2, and the method further comprises administering an anti-viral agent to the subject. In further embodiments, the anti-viral agent comprises Remdesivir or a protein comprising at least part of the ACE2 receptor. In other embodiments, the methods further comprise: administering an anti-inflammatory and/or anticoagulant to the subject. In some embodiments, the composition is an aqueous composition or a freeze-dried composition. In additional embodiments, the liposomes comprise lipids selected from the group consisting of: 1,2-dioleoyl-3-trimethylammonium-propane (DOTAP); 1,2-Dimyristoyl-sn-glycero-3-phosphocholine (DMPC); 1,2-dioleoyl-sn-glycero-3-phospho-L-serine (DOPS); and 1-stearoyl-2-oleoyl-sn-glycero-3-phospho-L-serine.

[0032] In certain embodiments, provided herein are methods comprising: a) administering a first composition to an animal model, wherein the first composition comprises polycationic structures, and wherein the first composition is free, or essentially free, of nucleic acid molecules, and wherein the animal model is infected with SARS-CoV-2; and b) administering a second composition to the animal model after administering the first composition, wherein the second composition comprises a plurality of one or more non-viral expression vectors that encode first and second anti-SARS-CoV-2 antibodies or antigen-binding portion thereof, and wherein, as a result of the administering the first and second compositions, the first and second candidate anti-SARS-CoV-2 antibodies or antigen-binding portions thereof, are expressed in the animal model; and c) determining the extent to which the expression of the first and second candidate anti-SARS-CoV-2 antibodies, or antigen-binding portions thereof, i) reduce the SARS-CoV-2 viral load in the animal model, and/or ii) reduce at least one symptom in the animal model caused by the SARS-CoV-2 infection. In particular embodiments, the plurality of one or more non-viral expression vectors further encode third, fourth, fifth, sixth, seventh, eighth, ninth, tenth, or eleventh candidate anti-SARS-CoV-2 antibodies or antigen-binding fragments thereof. In certain embodiments, the animal model is selected from a: mouse, rat, hamster, Guinee pig, primate, monkey, chimpanzee, or rabbit. In further embodiments, first and anti-SARS-CoV2 antibodies, or antigen binding portions thereof, are from Table 7 or Table 5. In additional embodiments, the first and second anti-SARS-CoV2 antibodies, or antigen binding portions thereof, are selected from the group consisting of: REGN10933, REGN10987; VIR-7831; LY-CoV1404; LY3853113; Zost 2355K; CV07-209K; C121L; Zost 2504L; CV38-183L; COVA215K; RBD215; CV07-250L; C144L; COVA118L; C135K; and B38. In certain embodiments, the first and second anti-SARS-CoV2 antibodies, or antigen binding portions thereof, are REGN10933 and REGN10987.

[0033] In further embodiments, the polycationic structures comprise cationic lipids. In some embodiments, first composition comprises a plurality of liposomes, wherein at least some of said liposomes comprises said cationic lipids. In other embodiments, at least some of said liposomes comprise neutral lipids. In further embodiments, the ratio of said cationic lipids to said neutral lipids in said liposomes is 95:05-80:20 or about 1:1. In other embodiments, the cationic and neutral lipids are selected from the group consisting of: distearoyl phosphatidyl choline (DSPC); hydrogenated or non-hydrogenated soya phosphatidylcholine (HSPC); distearoylphosphatidylethanolamine (DSPE); egg phosphatidylcholine (EPC); 1,2-Distearoyl-sn-glycero-3-phospho-rac-glycerol (DSPG); dimyristoyl phosphatidylcholine (DMPC); 1,2-Dimyristoyl-sn-glycero-3-phosphoglycerol (DMPG); 1,2-Dipalmitoyl-sn-glycero-3-phosphate (DPPA); trimethylammonium propane lipids; DOTIM (1-[2-9(2)-octadecenoylloxy)ethyl]-2-(8(2)-heptadecenyl)-3-(2-hydroxyethyl) midizolinium chloride) lipids; and mixtures of two or more thereof.

[0034] In some embodiments, the one or more non-viral expression vectors comprise plasmids, wherein the plasmids are not attached to, or encapsulated in, any delivery agent. In additional embodiments, the one or more non-viral expression vectors comprise a first nucleic acid sequence encoding an antibody light chain variable region, and a second nucleic acid sequence encoding an antibody heavy chain variable region, and optionally, a third nucleic acid sequence encoding an antibody light chain variable region, and a fourth nucleic acid sequence encoding an antibody heavy chain variable region. In certain embodiments, wherein: A) the antigen-binding portion thereof is selected from the group consisting of: a Fab′, F(ab)2, Fab, and a minibody, and/or B) the wherein the at least one anti-SARS-CoV-2 antibody, or antigen-binding portion thereof, is bi-specific for different SARS-CoV-2 antigens. In other embodiments, the anti-SARS-CoV-2 antibody is monoclonal antibody selected from the group consisting of: REGN10933, REGN10987; VIR-7831; LY-CoV1404; LY3853113; Zost 2355K; CV07-209K; C121L; Zost 2504L; CV38-183L; COVA215K; RBD215; CV07-250L; C144L; COVA118L; C135K; and B38. These antibodies are described in the following reference, which are each herein incorporated by reference: Zost et al., Nature Medicine volume 26, pages 1422-1427 (2020); Robbiani et al., Nature volume 584, pages 437-442 (2020); and Wu et al., Science, 2020 Jun. 12;368(6496):1274-1278; and see references in Table 7. Any combination of 2, 3, 4, 5, 6, 7, 8, 9, 10, 11, 12, 13, 14, 15, 16, or all 17 of these antibodies, or antigen binding fragments thereof, may be used in any of the embodiments described herein. In some embodiments, the anti-SARS-CoV-2 antibody, or antigen-binding portion thereof, comprises at least two, three, four, five, six, seven, eight, nine, ten, eleven, twelve, or more of any combination of the following: REGN10933, REGN10987; VIR-7831; LY-CoV1404; LY3853113; Zost 2355K; CV07-209K; C121L; Zost 2504L; CV38-183L; COVA215K; RBD215; CV07-250L; C144L; COVA118L; C135K; and B38 (or any of those shown in Table 7 or Table 5). In additional embodiments, the anti-SARS-CoV-2 antibody, or antigen binding portion thereof, is as described in Table 7.

[0035] In some embodiments, the at least one anti-SARS-CoV-2 antibody, or antigen-binding portion thereof, comprises at least two anti-SARS-CoV-2 antibodies, and/or antigen-binding portions thereof, which are expressed in the subject at an expression level sufficient to reduce: i) the SARS-CoV-2 viral load in the subject, and/or ii) at least one symptom in the subject caused by the SARS-CoV-2 infection. In other embodiments, the at least one anti-SARS-CoV-2 antibody, or antigen-binding portion thereof, comprises at least four, or at least eight, or at least eleven, anti-SARS-CoV-2 antibodies and/or antigen-binding portions thereof. In additional embodiments, the at least one anti-SARS-CoV-2 antibody, or antigen-binding portion thereof, comprises at least four, or at least eight, or at least 11, anti-SARS-CoV-2 antibodies and/or antigen-binding portions thereof, and which are expressed in the subject at an expression level sufficient to reduce: i) the SARS-CoV-2 viral load in the subject, and/or ii) at least one symptom in the subject caused by the SARS-CoV-2 infection.

[0036] In some embodiments, the administering comprises intravenous administering. In other embodiments, the second composition is administered: i) between 0.5 and 80 minutes after the first composition, or between about 1 and 20 minutes after the first composition. In particular embodiments, the methods further comprise: c) administering an agent, in the first and/or second composition, or present in a third composition, wherein the agent: i) increases the level of expression of the at least one anti-SARS-CoV-2 antibody or antigen-binding portion thereof, and/or ii) and/or the length of time of the expression compared to when the agent is not administered to the subject. In other embodiments, the agent is present in the first composition. In particular embodiments, the agent is present in the third composition, and is administered at least one hour prior to the first composition. In some embodiments, the agent is selected from the group consisting of: dexamethasone, dexamethasone palmitate, a dexamethasone fatty acid ester, Docosahexaenoic Acid (DHA), Eicosapenaenoic Acid (EPA), Alpha Linolenic Acid (ALA), Lipoxin A4 (LA4), 15-deoxy-12,14-Prostaglandin J2 (15d), Arachidonic Acid (AA), Docosapentaenoic Acid (DPA), Retinoic Acid (RA), Diallyl Disulfide (DADS), Oleic Acid (OA), Alpha Tocopherol (AT), Sphingosine-1-Phosphate (S-1-P), Palmitoyl Sphingomyelin (SPH), an anti-TNFa antibody or antigen binding fragment thereof, a heparinoid, and N-Acetyl-De-O-Sulfated Heparin. In certain embodiments, the dexamethasone fatty acid ester has the following Formula:

[chemical structure]

wherein R¹ is C₅-C₂₃ alkyl or C₅-C₂₃ alkenyl.

[0037] In certain embodiments, the agent (e.g., water soluble dexamethasone, aka dexamethasone cyclodextrin inclusion complex; see Sigma Sku D2915) is present in the first, second, or third composition at a concentration of 0.1-35 mg/ml or 0.001-1.0 mg/ml (e.g., 0.001 . . . 0.005 . . . 0.01 . . . 0.05 . . . 0.1 . . . 0.5 . . . 1.0 mg/ml). In other embodiments, the subject has lung, cardiovascular, and/or multi-organ inflammation. In particular embodiments, the subject is on a ventilator.

[0038] In some embodiments, the first and/or second compositions further comprise a physiologically tolerable buffer or intravenous solution. In other embodiments, the first and/or second compositions further comprise lactated Ringer's solution or saline solution.

[0039] In additional embodiments, the first compositions comprise liposomes comprising the polycationic structures, wherein the liposomes further comprising one or more macrophage targeting moieties selected from the group consisting of: mannose moieties, maleimide moieties, a folate receptor ligand, folate, folate receptor antibody or fragment thereof, formyl peptide receptor ligands, N-formyl-Met-Leu-Phe, tetrapeptide Thr-Lys-Pro-Arg, galactose, and lactobionic acid. In other embodiments, the plurality of one or more non-viral expression vectors are not attached to, or encapsulated in, any delivery agent.

[0040] In certain embodiments, the subject is a human. In particular embodiments, wherein 0.05-60 mg/mL of the expression vectors are present in the second composition. In other embodiments, the polycationic structures comprise cationic liposomes which are present at a concentration of 0.5-100 mM in the first composition. In further embodiments, the subject is a human, wherein: i) an amount of the first composition is administered such that the human receives a dosage of 2-50 mg/kg of the polycationic structures; and/or ii) an amount of the second composition is administered such that the human receives a dosage of 0.05-60 mg/kg of the expression vectors.

[0041] In some embodiments, the polycationic structures comprise cationic liposomes, wherein the cationic liposomes further comprise a lipid bi-layer integrating peptide and/or a target peptide. In certain embodiments, the lipid bi-layer integrating peptide is selected from the group consisting of: surfactant protein D (SPD), surfactant protein C (SPC), surfactant protein B (SPB), and surfactant protein A (SPA), and ii) the target peptide is selected from the group consisting of: microtubule-associated sequence (MTAS), nuclear localization signal (NLS), ER secretion peptide, ER retention peptide, and peroxisome peptide.

[0042] In other embodiments, steps a) and b) are repeated between 1 and 60 days after the initial step b). In some embodiments, each of the non-viral expression vectors comprise between 5,500 and 30,000 nucleic acid base pairs. In certain embodiments, the methods further comprise: administering an anti-viral agent to the subject. In some embodiments, the anti-viral agent comprises Remdesivir or a protein comprising at least part of the ACE2 receptor. In additional embodiments, the methods further comprise: administering an anti-inflammatory and/or anticoagulant to the subject. In some embodiments, the one or more non-viral expression vectors are CPG-free or CPG-reduced.

[0043] In some embodiments, the Agent herein comprises a dexamethasone fatty acid ester (e.g., as shown in Formula I). For example, dexamethasone palmitate has the following formula

[chemical structure]

Other fatty acid esters of dexamethasone can also be used, with another fatty acid ester replacing the palmitate group. In some embodiments, the fatty acid ester is a C₆-C₂₄ fatty acid ester, such as hexanoate (caproate), heptanoate (enanthate), octanoate (caprylate), nonanoate (pelargonate), decanoate (caprate), undecanoate, dodecanoate (laurate), tetradecanoate (myristate), octadecenoate (stearate), icosanoate (arachidate), docosanoate (behenate), and tetracosanoate (lignocerate). Accordingly, in some embodiments, the compound is selected from dexamethasone caproate, dexamethasone enanthate, dexamethasone caprylate, dexamethasone pelargonate, dexamethasone caprate, dexamethasone undecanoate, dexamethasone laurate, dexamethasone myristate, dexamethasone palmitate, dexamethasone stearate, dexamethasone arachidate, dexamethasone behenate, and dexamethasone lignocerate.

[0044] In certain embodiments, the agent is said dexamethasone fatty acid ester of Formula I, and wherein R¹ is a C₅-C₂₃ alkyl. In other embodiments, the agent is said dexamethasone fatty acid ester of Formula I, and wherein R¹ is a C₅-C₂₃ straight chain alkyl. In other embodiments, the agent is said dexamethasone fatty acid ester of Formula I, and wherein R¹ is a C₁₅ alkyl.

### DESCRIPTION OF THE FIGURES

[0045] The patent or application file contains at least one drawing executed in color. Copies of this patent or patent application publication with color drawings will be provided by the Office upon request and payment of the necessary fee.

[0046] FIG. 1 shows results from Example 1, showing expression levels over 36 days for four different antibodies or antibody fragments (anti-IL5; 5J8 anti-flu; anti-SARS-CoV-2; and anti-CD20).

[0047] FIG. 2 shows results from Example 2, showing expression levels over 43 days for anti-SARS-CoV-2 antibody, as well as expression data for anti-IL5, 5J8 anti-flu, and anti-Sars-Cov2.

[0048] FIG. 3A shows results from Example 3, which shows expression levels of multiple unique monoclonal antibodies. FIG. 3B shows results from Example 3, which shows expression levels of the antibodies at various time points over 29 days after initial injection.

[0049] FIG. 4 shows results from Example 4, which shows expression levels of antibodies at certain days after injection.

[0050] FIG. 5A shows results from Example 5, which shows expression levels of various proteins over 15 days. FIG. 5B shows the results of Example 5, which shows expression levels of various proteins over 22 days.

[0051] FIG. 6 shows results from Example 6, which shows expression levels of various antibodies over 22 days.

[0052] FIG. 7 shows results from Example 7, which shows expression levels of various proteins.

[0053] FIGS. 8A and 8B show results from Example 8, which shows expression levels of cDNA-encoded recombinant ACE2 proteins over 9 days.

[0054] FIG. 9 shows results from Example 9 which shows expression levels of human ACE2 and a variant thereof.

[0055] FIG. 10 shows the nucleic acid sequence for plasmid 070120 #1: B38-Lambda-BV3 (SEQ ID NO:10).

[0056] FIG. 11 shows the nucleic acid sequence for plasmid 070120 #11: B38H-B38L-BV3 Dual (SEQ ID NO:11).

[0057] FIG. 12 shows the nucleic acid sequence for plasmid 070320 #4: B38-Kappa-BV3 (SEQ ID NO:12).

[0058] FIG. 13 shows the nucleic acid sequence for plasmid 071320 #3: H4-Kappa-BV3 (SEQ ID NO:13).

[0059] FIG. 14 shows the nucleic acid sequence for plasmid 080920 #6: H4-H4-Kappa-BV3 (SEQ ID NO:14).

[0060] FIG. 15 shows the nucleic acid sequence for plasmid 072620 #5A: 4A8-BV3 (SEQ ID NO:15).

[0061] FIG. 16 shows the nucleic acid sequence for plasmid 081820 #2: 4A8-4A8-BV3 (SEQ ID NO:16).

[0062] FIG. 17 shows the nucleic acid sequence for plasmid 081820 #3: 4A8-B38Kappa-BV3 (SEQ ID NO:17).

[0063] FIG. 18 shows the nucleic acid sequence for plasmid 081820 #4: 4A8-H4-BV3 (SEQ ID NO:18).

[0064] FIG. 19 shows the nucleic acid sequence for plasmid 081820 #5: 4A8-shACE2-BV3 (SEQ ID NO:19).

[0065] FIG. 20 shows the nucleic acid sequence for plasmid 080420 #3: shACE2-BV3 (SEQ ID NO:20).

[0066] FIG. 21 shows the nucleic acid sequence for plasmid 082020 #1: shACE2 TYLTNY-BV3 (SEQ IDNO:21).

[0067] FIG. 22 shows the nucleic acid sequence for plasmid 081320 #2A: shACE2-lxL-Fc-BV3 (SEQ ID NO:22).

[0068] FIG. 23 shows the nucleic acid sequence for plasmid 081320 #4A: shACE2-1xL-FcLALA-BV3 (SEQ ID NO:23).

[0069] FIG. 24 shows the nucleic acid sequence for plasmid 082620 #5A: shACE2 TYLTNY-1xL-FcLALA-BV3 (SEQ ID NO:24).

[0070] FIG. 25 shows the nucleic acid sequence for plasmid 080420 #4: shACE2-shACE2-BV3 (SEQ ID NO:25).

[0071] FIG. 26 shows the nucleic acid sequence for plasmid 081120 #1: B38Kappa-shACE2-BV3 (SEQ ID NO:26).

[0072] FIG. 27 shows the nucleic acid sequence for plasmid 081120 #4: shACE2-B38Kappa-BV3 (SEQ ID NO:27).

[0073] FIG. 28 shows the nucleic acid sequence for plasmid 081120 #2: H4-shACE2-BV3 (SEQ ID NO:28).

[0074] FIG. 29 shows the nucleic acid sequence of plasmid 081120 #5: shACE2-H4-BV3 (SEQ ID NO:29).

[0075] FIG. 30 shows the nucleic acid sequence of plasmid 072320 #2: H4-aCD20-aIL5-5J8-BV2 (SEQ ID NO:30).

[0076] FIG. 31 shows the nucleic acid sequence of plasmid 070620 #2: B38 Lambda-aCD20(Cys)-BV3 (SEQ ID NO:31).

[0077] FIG. 32 shows the nucleic acid sequence of plasmid 120717 #1: aCD20-aIL5-5J8-BV2 (SEQ ID NO:32).

[0078] FIG. 33 shows the nucleic acid sequence of plasmid 122019 #2A: GLA-1xL-hyFc (SEQ ID NO:33).

[0079] FIG. 34 shows the nucleic acid sequence of plasmid 011215 #7: hGCSF-BV3 (SEQ ID NO:34).

[0080] FIG. 35 shows the nucleic acid sequence of plasmid 071816 #1: (SEQ ID NO:35).

[0081] FIG. 36 shows the nucleic acid sequence of plasmid 072520 #4: aCD20-aCD20 (SEQ ID NO:36).

[0082] FIG. 37 shows the nucleic acid sequence of plasmid 111517 #1: 5J8-5J8: Double 2A (SEQ ID NO:37).

[0083] FIG. 38 shows the nucleic acid sequence of plasmid 111517 #3: aIL5-aIL5: Double 2A (SEQ ID NO:38).

[0084] FIG. 39 shows the nucleic acid sequence of plasmid 111517 #19A: 5J8-aIL5: Daul 2A (SEQ ID NO:39).

[0085] FIGS. 40A-40F show the nucleic acid sequences of: FIG. 40A) Codon Optimized Human Growth Hormone (hGH1) cDNA (SEQ ID NO:40); FIG. 40B) hGH1-Fc (SEQ ID NO:41); FIG. 40C) Linker GGGGS (SEQ ID NO:42), 1xLinker: GGTGGAGGAGGTAGT (SEQ ID NO:43), 2xLinker: GGTGGAGGAGGTAGTGGGGGTGGAGGTTCA (SEQ ID NO:44), and 3xLinker: GGAGGAGGTGGATCAGGTGGAGGAGGTAGTGGGGGTGGAGGTTCA (SEQ ID NO:45);

[0086] FIG. 40D) Fc (SEQ ID NO:46); FIG. 40E) Fc chainA (SEQ ID NO:47); and FIG. 40F) Fc chainB (SEQ ID NO:48).

[0087] FIGS. 41A-41F show the nucleic acid sequences of: FIG. 41A) Fc chainAB (SEQ ID NO:49); FIG. 41B) Fc-IgG4 (SEQ ID NO:50); FIG. 41C) hyFc (SEQ ID NO:51); FIG. 41D) mFc (SEQ ID NO:52); FIG. 41E) GAALIE (SEQ ID NO:53); and FIG. 41F) GAALIE-LS (SEQ ID NO:54).

[0088] FIGS. 42A-42B show the nucleic acid sequences of: FIG. 42A) hGH1-HSA (SEQ ID NO:55); and FIG. 42B) HSA-K753P-Linker-GH1: (SEQ ID NO:56).

[0089] FIGS. 43A-43D show the nucleic acid sequences of: FIG. 43A) hGH1-CTP (SEQ ID NO:57); FIG. 43B) CTP-hGH1-CTP (SEQ ID NO:58); FIG. 43C) CTP-hGH1 (SEQ ID NO:59); and FIG. 43D) XTEN1-hGH1 (SEQ ID NO:60).

[0090] FIGS. 44A-44B show the nucleic acid sequences of: FIG. 44A) XTEN1-hGH1-XTEN2 (SEQ ID NO:61); and FIG. 44B) Hgh1-XTEN2 (SEQ ID NO:62).

[0091] FIG. 45A shows that expression of the wild type Hgh Cdna fused to a protein half-life extending DNA sequence, including Fc, serum albumin or Xten can significantly increase serum Hgh levels over time in immunocompetent mice. FIG. 45B shows that the Cdna-encoded Hgh protein produced is fully bioactive, as it appropriately increases the levels of the Hgh-regulated, endogenous mouse, IGF-1 protein. FIG. 45C shows one injection of a DNA vector in the procedure of Example 10 procedure drives the wild type Hgh Cdna but lacking any protein half-life extending DNA sequence can produce durable production of therapeutic Hgh serum levels in immunocompetent mice.

[0092] FIG. 46 shows that the procedures of Example 11 can be used to express wild type Hgh Cdna fused to a protein half-life extending DNA sequence, including Fc, serum albumin or Xten to significantly increase serum Hgh levels over time in immunocompetent mice.

[0093] FIG. 47 shows that, using the procedure of Example 12, one re-injection of a DNA vector driving the wild type Hgh Cdna into fully immunocompetent mice can significantly and durably further increase serum Hgh levels produced by the initial HEDGES Hgh DNA vector injection.

[0094] FIG. 48 shows expression levels of hGH fused to an Fc region protein extends the half-life of hGH out to a least 225 days and after a single DNA injection in mice.

[0095] FIG. 49 shows expression levels of hGH fused to an Fc region protein out 64 days from treatment.

[0096] FIG. 50A shows that selective site-directed mutagenesis of the Fc region of an DNA vector driving the wild type hGH cDNA fused to an Fc protein half-life extending DNA sequence can selectively either increase or decrease serum hGH levels produced in immunocompetent mice.

[0097] FIG. 50B shows that selective site-directed mutagenesis of the Fc region of a DNA vector driving the wild type hGH cDNA fused to an Fc protein half-life extending DNA sequence can selectively increase serum hGH levels produced over time in immunocompetent mice.

[0098] FIG. 51 shows that incorporating an optimized molar percentage of dexamethasone palmitate (DexPalm) into cationic liposomes can both further increase gene expression and further decrease toxicity.

[0099] FIG. 52 shows that incorporating an optimized molar percentage of dexamethasone palmitate into cationic liposomes can both further increase gene expression and further decrease toxicity.

[0100] FIG. 53 shows that pre-injecting an optimized molar percentage of dexamethasone palmitate in liposomes prior to injecting cationic liposomes can both further increase gene expression and further decrease toxicity.

[0101] FIG. 54 shows that injecting some AILs incorporated into cationic liposomes can both further increase gene expression and further decrease toxicity (ALT levels).

[0102] FIG. 55 shows that injecting certain AILs incorporated into cationic liposomes can both further increase gene expression and further decrease toxicity (ALT levels).

[0103] FIG. 56 shows that incorporating an optimized molar percentage of dexamethasone palmitate into cationic liposomes can further increase peak levels of gene expression following an otherwise ineffective hG-CSF-DNA dose.

[0104] FIG. 57 shows that by selectively modifying the lipid composition of liposomes administered intranasally, that these liposomes can be selectively targeted to intrapulmonary monocytes and macrophages to different extents, thus selectively immune-modulating the lung.

[0105] FIG. 58 shows that by selectively modifying a parenteral aqueous soluble pre-dose, and/or the molar percentage of dexamethasone palmitate incorporated into subsequently administered liposomes, that the level of T lymphocyte activation both in lung and in the blood can be selectively immuno-modulated.

[0106] FIG. 59 shows that by selectively modifying a parenteral aqueous soluble pre-dose, and/or the molar percentage of dexamethasone palmitate incorporated into subsequently administered liposomes, that the level of T lymphocyte activation both in lung and in the blood can be selectively immuno-modulated.

[0107] FIG. 60 shows that pre-administration of an anti-TNF monoclonal antibody, can both further increase gene expression while further reducing its toxicity.

[0108] FIG. 61, which shows that either pre- or post-administration of NSH can reduce toxicity.

[0109] FIG. 62 shows that either pre- or post-administration of NSH can reduce toxicity.

[0110] FIG. 63 shows that either pre-administration of NSH can both further increase gene expression while further reducing its toxicity.

[0111] FIG. 64 shows that administration of various formulations of liposomes containing dexamethasone palmitate decreases lymphocyte counts in blood compared to systemic administration of dexamethasone alone.

[0112] FIG. 65 shows that administration of various formulations of liposomes containing dexamethasone palmitate decreases monocyte counts in blood compared to systemic administration of dexamethasone alone.

[0113] FIG. 66 shows results of Example 22, which shows that one injection of different single DNA expression plasmids each encoding one of five different SARS-CoV2-specific mAb (C135, C215, COV2-2355, CV07-209, and C121) produces fully neutralizing serum levels of each SARS-CoV2-specific mAb for the full experimental course of at least 134 days following administration, and that these ongoing serum mAb levels functionally and continuously block SARS-CoV2 spike-human ACE2 binding for at least 120 days.

[0114] FIG. 67 shows results from Example 23, which shows that a single injection results in expression of two SARS-CoV2-specific mAbs from a single plasmid for the course of at least 134 days following this procedure, and that these serum-expressed mAbs sera are functionally capable of blocking SARS-CoV2 spike-human ACE2 interactions for at least 134 days.

[0115] FIGS. 68A-68B show results from Example 24 where three different approaches were successfully employed to express simultaneously express two anti-SARS-CoV2 mAbs simultaneously by the three approaches tried. All three approaches successfully allow for the expression of two mAbs in serum of animals at levels (FIG. 68B shows expression levels) that allow for neutralization of SARS-CoV2/ACE2 interactions (FIG. 68B shows neutralization ability).

[0116] FIG. 69 shows results from Example 25, which shows that two weekly injections of one or two DNA expression plasmids encoding a total of three different individual SARS-CoV2-specific mAbs produces fully neutralizing serum levels of three different SARS-CoV2-specific mAbs for the course of at least 70 days following administration, and that these ongoing serum mAbs levels functionally and continuously block SARS-CoV2 spike-human ACE2 for at least 70 days.

[0117] FIG. 70 shows the results from Example 26, which shows the expression levels and neutralizing ability of four anti-SARS-CoV-2 antibodies expressed in mice.

[0118] FIG. 71 shows the results from Example 27, which shows the expression levels and neutralizing ability of four anti-SARS-CoV-2 antibodies expressed in mice.

[0119] FIG. 72 shows the results from Example 28, which shows the expression levels and neutralizing ability of four anti-SARS-CoV-2 antibodies expressed in mice.

[0120] FIG. 73 shows the results from Example 29, which shows the expression levels and neutralizing ability of four anti-SARS-CoV-2 antibodies expressed in mice.

[0121] FIG. 74 shows the results from Example 30, which shows the expression levels and neutralizing ability of four anti-SARS-CoV-2 antibodies expressed in mice.

[0122] FIG. 75 shows the results from Example 31, which shows the expression levels and neutralizing ability of five anti-SARS-CoV-2 antibodies expressed in mice.

[0123] FIG. 76 shows the results from Example 32, which shows the expression levels and neutralizing ability of six anti-SARS-CoV-2 antibodies expressed in mice.

[0124] FIG. 77 shows the results from Example 33, which shows the expression levels and neutralizing ability of six anti-SARS-CoV-2 antibodies expressed in mice.

[0125] FIG. 78 shows the results from Example 34, which shows the expression levels and neutralizing ability of six anti-SARS-CoV-2 antibodies expressed in mice.

[0126] FIG. 79 shows the results from Example 35, which shows the expression levels and neutralizing ability of eight anti-SARS-CoV-2 antibodies expressed in mice.

[0127] FIG. 80 shows the results from Example 36, which shows the expression levels and neutralizing ability of eight anti-SARS-CoV-2 antibodies expressed in mice.

[0128] FIG. 81 shows the results from Example 37, which shows the expression levels and neutralizing ability of eight anti-SARS-CoV-2 antibodies expressed in mice.

[0129] FIG. 82 shows the results from Example 38, which shows the expression levels and neutralizing ability of eight anti-SARS-CoV-2 antibodies expressed in mice.

[0130] FIG. 83 shows the results from Example 39, which shows the expression levels and neutralizing ability of 10 anti-SARS-CoV-2 antibodies, as well as expression levels of other non-Sars-CoV-2 antibodies and various therapeutic proteins, expressed in mice.

[0131] FIG. 84 shows the results from Example 40, which shows the expression levels and neutralizing ability of 11 anti-SARS-CoV-2 antibodies, as well as expression levels of other non-Sars-CoV-2 antibodies and various therapeutic proteins, expressed in mice.

[0132] FIG. 85 shows the results from Example 41, which shows the expression levels and neutralizing ability of 10 anti-SARS-CoV-2 antibodies, as well as expression levels of other non-Sars-CoV-2 antibodies, expressed in mice.

[0133] FIG. 86A shows the results from Example 42, which shows expression levels of the indicated mAbs over 1-48 hours. FIG. 86B shows neutralizing ability of the indicated mAbs over a period of 1-48 hours.

[0134] FIG. 87 shows the results from Example 43, which describes the simultaneous expression of six different mAb and genes using a single injection.

[0135] FIG. 88 shows the results from Example 44, which describes the use of various eukaryotic promoters to express a target gene (human growth hormone) over 120 days.

[0136] FIGS. 89A-89B show the results from Example 45, which describes simultaneously testing 11 different hGLA DNA vectors, showing that they produce a spectrum of serum levels over time.

[0137] FIG. 90 shows the results from Example 46, which shows Fc-modified GLA can be expressed in heart tissue at therapeutic levels 104 days after injection of vector.

[0138] FIG. 91 shows the results from Example 47, which compares the expression of various mutated Fc regions for GLA-Fc expression.

[0139] FIG. 92 shows the results of Example 48, which describes the use of low dose dexamethasone pretreatment does not interfere with the durability of protein expression durability (and acute expression may be augmented).

### DEFINITIONS

[0140] As used herein, the phrase “CpG-reduced” refers to a nucleic acid sequence or expression vector that has less CpG di-nucleotides than present in the wild-type versions of the sequence or vector. “CpG-free” means the subject nucleic acid sequence or vector does not have any CpG di-nucleotides. An initial sequence, that contains CpG dinucleotides (e.g., wild-type version of an anti-SARS-CoV-2 antibody), may be modified to remove CpG dinucleotides by altering the nucleic acid sequence. Such CpG di-nucleotides can be suitably reduced or eliminated not just in a coding sequence, but also in the non-coding sequences, including, e.g., 5′ and 3′ untranslated regions (UTRs), promoter, enhancer, polyA, ITRs, introns, and any other sequences present in the nucleic acid molecule or vector. In certain embodiments, the nucleic acid sequences employed herein are CpG-reduced or CpG-free.

[0141] As used herein, “empty liposomes” refers to liposomes that do not contain nucleic acid molecules but that may contain other bioactive molecules (e.g., liposomes that are only composed of the lipid molecules themselves, or only lipid molecules and a small molecule drug). In certain embodiments, empty liposomes are used with any of the methods or compositions disclosed herein.

[0142] As used herein, “empty cationic micelles” refers to cationic micelles that do not contain nucleic acid molecules but that may contain other bioactive molecules (e.g., micelles that are only composed of lipid and surfactant molecules themselves, or only lipid and surfactant molecules and a small molecule drug). In certain embodiments, empty cationic micelles are used with any of the methods or compositions disclosed herein.

[0143] As used herein, “empty cationic emulsions” refers to cationic emulsions or micro-emulsions that do not contain nucleic acid molecules but that may contain other bioactive molecules. In certain embodiments, empty cationic emulsions are used with any of the methods or compositions disclosed herein.

[0144] As used herein, the term “alkyl” means a straight or branched saturated hydrocarbon chain containing from 1 to 30 carbon atoms, for example 1 to 16 carbon atoms (C₁-C₁₆ alkyl), 1 to 14 carbon atoms (C₁-C₁₄ alkyl), 1 to 12 carbon atoms (C₁-C₁₂ alkyl), 1 to 10 carbon atoms (C₁-C₁₀ alkyl), 1 to 8 carbon atoms (C₁-C₈ alkyl), 1 to 6 carbon atoms (C₁-C₆ alkyl), 1 to 4 carbon atoms (C₁-C₄ alkyl), or 5 to 23 carbon atoms (C₅-C₂₃ alkyl). Representative examples of alkyl include, but are not limited to, methyl, ethyl, n-propyl, iso-propyl, n-butyl, sec-butyl, iso-butyl, tert-butyl, n-pentyl, isopentyl, neopentyl, n-hexyl, 3-methylhexyl, 2,2-dimethylpentyl, 2,3-dimethylpentyl, n-heptyl, n-octyl, n-nonyl, n-decyl, n-undecyl, and n-dodecyl.

[0145] As used herein, the term “alkenyl” refers to a straight or branched hydrocarbon chain containing from 2 to 30 carbon atoms and containing at least one carbon-carbon double bond, for example 2 to 16 carbon atoms (C₂-C₁₆ alkyl), 2 to 14 carbon atoms (C₂-C₁₄ alkyl), 2 to 12 carbon atoms (C₂-C₁₂ alkyl), 2 to 10 carbon atoms (C₂-C₁₀ alkyl), 2 to 8 carbon atoms (C₂-C₈ alkyl), 2 to 6 carbon atoms (C₂-C₆ alkyl), 2 to 4 carbon atoms (C₂-C₄ alkyl), or 5 to 23 carbon atoms (C₅-C₂₃ alkyl). Representative examples of alkenyl include, but are not limited to, ethenyl, 2-propenyl, 2-methyl-2-propenyl, 3-butenyl, 4-pentenyl, 5-hexenyl, 2-heptenyl, 2-methyl-1-heptenyl, and 3-decenyl.

[0146] As used herein, the terms “subject” and “patient” refer to any animal, such as a mammal like a dog, cat, bird, livestock, and preferably a human.

[0147] As used herein, the term “administration” refers to the act of giving a composition as described herein to a subject. Exemplary routes of administration to the human body can be through the mouth (oral), skin (transdermal, topical), nose (nasal), lungs (inhalant), oral mucosa (buccal), by injection (e.g., intravenously, subcutaneously, intratumorally, intraocular, intraperitoneally, etc.), and the like.

### DETAILED DESCRIPTION

[0148] The present invention provides compositions, systems, kits, and methods for expressing at least one therapeutic protein or biologically active nucleic acid molecule in a subject. In certain embodiments, the subject is first administered a composition comprising polycationic structures that is free, or essentially free, of nucleic acid molecules, and then (e.g., 1-30 minutes later) is administered a composition comprising a plurality of one or more non-viral expression vectors that encode at least one therapeutic protein (e.g., at least one anti-SARS-CoV-2 antibody, multiple different antibodies, at least one recombinant ACE2, or human growth hormone) or a biologically active nucleic acid molecule. In some embodiments, an agent is further administered (e.g., EPA or DHA) that increases the level and/or length of expression in a subject. In particular embodiments, the first and/or second composition is administered via the subject's airway.

[0149] The present disclosure provides methods, systems, and compositions, that allow a single injection (e.g., intravenous injection) of cationic liposomes, followed shortly thereafter by injection (e.g., intravenous injection) of vectors encoding at least one protein or biologically active nucleic acid molecule, to produce circulating protein levels many times (e.g., 2-20 times higher) than with other approaches (e.g., allowing for expression for a prolonged period, such at 190 days or over 500 days).

[0150] In certain embodiments, the present disclosure employs polycationic structures (e.g., empty cationic liposomes, empty cationic micelles, or empty cationic emulsions) not containing vector DNA, which are administered to a subject prior to vector administration. In certain embodiments, the polycationic structures are cationic lipids and/or are provided as an emulsion. The present disclosure is not limited to the cationic lipids employed, which can be composed, in some embodiments, of one or more of the following: DDAB, dimethyldioctadecyl ammonium bromide; DPTAP (1,2-dipalmitoyl 3-trimethylammonium propane); DHA; prostaglandin, N-[1-(2,3-Dioloyloxy)propyl]-N,N,N-trimethylammonium methylsulfate; 1,2-diacyl-3-trimethylammonium-propanes, (including but not limited to, dioleoyl (DOTAP), dimyristoyl, dipalmitoyl, disearoyl); 1,2-diacyl-3-dimethylammonium-propanes, (including but not limited to, dioleoyl, dimyristoyl, dipalmitoyl, disearoyl) DOTMA, N-[1-[2,3-bis(oleoyloxy)]propyl]-N,N,N-trimethylammoniu-m chloride; DOGS, dioctadecylamidoglycylspermine; DC-cholesterol, 3.beta.-[N-(N′,N′-dimethylaminoethane)carbamoyl]cholesterol; DOSPA, 2,3-dioleoyloxy-N-(2(sperminecarboxamido)-ethyl)-N,N-dimethyl-1-propanami-nium trifluoroacetate; 1,2-diacyl-sn-glycero-3-ethylphosphocholines (including but not limited to dioleoyl (DOEPC), dilauroyl, dimyristoyl, dipalmitoyl, distearoyl, palmitoyl-oleoyl); beta-alanyl cholesterol; CTAB, cetyl trimethyl ammonium bromide; diC14-amidine, N-t-butyl-N′-tetradecyl-3-tetradecylaminopropionamidine; 14Dea2, O,O′-ditetradecanolyl-N-(trimethylammonioacetyl) diethanolamine chloride; DOSPER, 1,3-dioleoyloxy-2-(6-carboxy-spermyl)-propylamide; N,N,N′,N′-tetramethyl-N,N′-bis(2-hydroxylethyl)-2,3-dioleoyloxy-1,4-butan-ediammonium iodide; 1-[2-acyloxy)ethyl]2-alkyl (alkenyl)-3-(2-hydroxyethyl-) imidazolinium chloride derivatives such as 1-[2-(9(Z)-octadecenoyloxy)eth-yl]-2-(8(Z)-heptadecenyl-3-(2-hydroxyethyl)imidazolinium chloride (DOTIM), 1-[2-(hexadecanoyloxy)ethyl]-2-pentadecyl-3-(2-hydroxyethyl)imidazolinium chloride (DPTIM); 1-[2-tetradecanoyloxy)ethyl]-2-tridecyl-3-(2-hydroxyeth-yl)imidazolium chloride (DMTIM) (e.g., as described in Solodin et al. (1995) Biochem. 43:13537-13544, herein incorporated by reference); 2,3-dialkyloxypropyl quaternary ammonium compound derivates, containing a hydroxyalkyl moiety on the quaternary amine, such as 1,2-dioleoyl-3-dimethyl-hydroxyethyl ammonium bromide (DORI); 1,2-dioleyloxypropyl-3-dimethyl-hydroxyethyl ammonium bromide (DORIE); 1,2-dioleyloxypropyl-3-dimethyl-hydroxypropyl ammonium bromide (DORIE-HP), 1,2-dioleyloxypropyl-3-dimethyl-hydroxybutyl ammonium bromide (DORIE-HB); 1,2-dioleyloxypropyl-3-dimethyl-hydroxypentyl ammonium bromide (DORIE-HPe); 1,2-dimyristyloxypropyl-3-dimethyl-hydroxylethyl ammonium bromide (DMRIE); 1,2-dipalmityloxypropyl-3-dimethyl-hydroxyethyl ammonium bromide (DPRIE); 1,2-disteryloxypropyl-3-dimethyl-hydroxyethyl ammonium bromide (DSRIE) (e.g., as described in Felgner et al. (1994) J. Biol. Chem. 269:2550-2561, herein incorporated by reference in its entirety). Many of the above-mentioned lipids are available commercially from, e.g., Avanti Polar Lipids, Inc.; Sigma Chemical Co.; Molecular Probes, Inc.; Northern Lipids, Inc.; Roche Molecular Biochemicals; and Promega Corp.

[0151] In certain embodiments, the neutral lipids employed with the methods, compositions, systems, and kits includes diacylglycerophosphorylcholine wherein the acyl chains are generally at least 12 carbons in length (e.g., 12 . . . 14 . . . 20 . . . 24 . . . or more carbons in length), and may contain one or more cis or trans double bonds. Examples of said compounds include, but are not limited to, distearoyl phosphatidyl choline (DSPC), dimyristoyl phosphatidylcholine (DMPC), dipalmitoyl phosphatidylcholine (DPPC), palmitoyl oleoyl phosphatidylcholine (POPC), palmitoyl stearoyl phosphatidylcholine (PSPC), egg phosphatidylcholine (EPC), hydrogenated or non-hydrogenated soya phosphatidylcholine (HSPC), or sunflower phosphatidylcholine.

[0152] In certain embodiments, the neutral lipids include, for example, up to 70 mol diacylglycerophosphorylethanolamine/100 mol phospholipid (e.g., 10/100 mol . . . 25/100 mol . . . 50/100 . . . 70/100 mol). In some embodiments, the diacylglycerophosphorylethanolamine has acyl chains that are generally at least 12 carbons in length (e.g., 12 . . . 14 . . . 20 . . . 24 . . . or more carbons in length), and may contain one or more cis or trans double bonds. Examples of such compounds include, but are not limited to distearoylphosphatidylethanolamine (DSPE), dimyristoylphosphatidylethanolamine (DMPE), dipalmitoylphosphatidylethanolamine (DPPE), palmitoyloleoylphosphatidylethanolamine (POPE), egg phosphatidylethanolamine (EPE), and transphosphatidylated phosphatidylethanolamine (t-EPE), which can be generated from various natural or semisynthetic phosphatidylcholines using phospholipase D.

[0153] In certain embodiments, the present disclosure employs CpG-reduced or CpG-free expression vectors. An initial sequence that contains CpG dinucleotides (e.g., wild-type version of an anti-SARS-CoV-2 antibody), may be modified to remove CpG dinucleotides by altering the nucleic acid sequence. Such CpG di-nucleotides can be suitably reduced or eliminated not just in a coding sequence, but also in the non-coding sequences, including, e.g., 5′ and 3′ untranslated regions (UTRs), promoter, enhancer, polyA, ITRs, introns, and any other sequences present in the nucleic acid molecule or vector. CpG di-nucleotides may be located within a codon triplet for a selected amino acid. There are five amino acids (serine, proline, threonine, alanine, and arginine) that have one or more codon triplets that contain a CpG di-nucleotide. All five of these amino acids have alternative codons not containing a CpG di-nucleotide that can be changed to, to avoid the CpG but still code for the same amino acid as shown in Table 1 below. Therefore, the CpG di-nucleotides allocated within a codon triplet for a selected amino acid may be changed to a codon triplet for the same amino acid lacking a CpG di-nucleotide.

TABLE 1

| | DNA Codons | DNA Codons |
|---|---|---|
| Amino Acid | Containing CpG | Lacking CpG |
| Serine (Ser or S) | TCG | TCT, TCC, TCA, |
| | | AGT, AGC |
| Proline (Pro or P) | CCG | CCT, CCC, CCA, |
| Threonine (Thr or T) | ACG | ACA, ACT, ACC |
| Alanine (Ala or A) | GCG | GCT, GCC, GCA |
| Arginine (Arg or R) | CGT, CGC, | AGA, AGG |
| | CGA, CGG | |

[0154] In addition, within the coding region, the interface between triplets should be taken into consideration. For example, if an amino acid triplet ends in a C-nucleotide which is then followed by an amino acid triplet which can start only with a G-nucleotide (e.g., Valine, Glycine, Glutamic Acid, Alanine, Aspartic Acid), then the triplet for the first amino acid triplet is changed to one which does not end in a C-nucleotide. Methods for making CpG free sequences are shown, for example, in U.S. Pat. No. 7,244,609, which is herein incorporated by reference. A commercial service provided by INVIVOGEN is also available to produce CpG free (or reduced) nucleic acid sequences/vectors (plasmids). A commercial service provided by ThermoScientific produces CpG free nucleotide.

[0155] Provided below in Table 2 are exemplary promoters and enhancers that may be used in the vectors described herein. Such promoters, and other promoters known in the art, may be used alone or with any of the enhancers, or enhancers, known in the art. Additionally, when multiple proteins or biologically active nucleic acid molecules (e.g., two, three, four, or more) are expressed from the same vector, the same or different promoters may be used in conjunction with the subject nucleic acid sequence. In some embodiments, a promoter selected from the following list is employed to control the expression levels of the protein or nucleic acid: FerL, FerH, Grp78, hREG1B, and cBOX1. Such promoter can be used, for example, to control production of a protein (e.g., HGH) protein production over a broad temporal range (e.g., without the use of any other modifications including Gene switches).

TABLE 2

| Promoter | Enhancer |
|---|---|
| CMV | human CMV |
| EF1α | mouse CMV |
| Ferritin (Heavy/Light) Chain | SV40 |
| GRP94 | Ubc |
| U1 | AP1 |
| UbC | hr3 |
| Beta Actin | IE2 |
| PGK1 | IE6 |
| GRP78 | E2-RS |
| CAG | MEF2 |
| SV40 | C/EBP |
| TRE | HNF-1 |

[0156] In some embodiments, compositions and systems herein are provided and/or administered in doses selected to elicit a therapeutic and/or prophylactic effect in an appropriate subject (e.g., mouse, human, etc.). In some embodiments, a therapeutic dose is provided. In some embodiments, a prophylactic dose is provided. Dosing and administration regimes are tailored by the clinician, or others skilled in the pharmacological arts, based upon well-known pharmacological and therapeutic/prophylactic considerations including, but not limited to, the desired level of pharmacologic effect, the practical level of pharmacologic effect obtainable, toxicity. Generally, it is advisable to follow well-known pharmacological principles for administrating pharmaceutical agents (e.g., it is generally advisable to not change dosages by more than 50% at time and no more than every 3-4 agent half-lives). For compositions that have relatively little or no dose-related toxicity considerations, and where maximum efficacy is desired, doses in excess of the average required dose are not uncommon. This approach to dosing is commonly referred to as the “maximal dose” strategy. In certain embodiments, a dose (e.g., therapeutic of prophylactic) is about 0.01 mg/kg to about 200 mg/kg (e.g., 0.01 mg/kg, 0.02 mg/kg, 0.05 mg/kg, 0.1 mg/kg, 0.2 mg/kg, 0.5 mg/kg, 1.0 mg/kg, 2.0 mg/kg, 5.0 mg/kg, 10 mg/kg, 20 mg/kg, 50 mg/kg, 100 mg/kg, 200 mg/kg, or any ranges therebetween (e.g., 5.0 mg/kg to 100 mg/kg)). In some embodiments, a subject is between 0.1 kg (e.g., mouse) and 150 kg (e.g., human), for example, 0.1 kg, 0.2 kg, 0.5 kg, 1.0 kg, 2.0 kg, 5.0 kg, 10 kg, 20 kg, 50 kg, 100 kg, 200 kg, or any ranges therebetween (e.g., 40-125 kg). In some embodiments, a dose comprises between 0.001 mg and 40,000 mg (e.g., 0.001 mg, 0.002 mg, 0.005 mg, 0.01 mg, 0.02 mg, 0.05 mg, 0.1 kg, 0.2 mg, 0.5 mg, 1.0 mg, 2.0 mg, 5.0 mg, 10 mg, 20 mg, 50 mg, 100 mg, 200 mg, 500 mg, 1,000 mg, 2,000 mg, 5,000 mg, 10,000 mg, 20,000 mg, 40,000 mg, or ranges therebetween.

[0157] In certain embodiments, a target peptide is used with the cationic or neutral liposomes in the compositions herein. Exemplary target peptides are shown in Table 3 below. In table 3, “[n]” prefix indicates the N-terminus and a “[c]” suffix indicates the C-terminus; sequences lacking either are found in the middle of the protein.

TABLE 3

| Target | Sequence | Source protein or organism |
|---|---|---|
| nucleus (NLS) | PKKKRKV (SEQ ID NO: 1) | SV40 large T antigen (P03070) |
| Out of nucleus (NES) | IDMLIDLGLDLSD (SEQ ID NO: 2) | HSV transcriptional regulator |
| | | IE63 P10238 |
| ER, secretion (signal | [n]MMSFVSLLLVGILFWATEAEQLTKCEVF | Lactalbumin (P09462) |
| peptide) | Q (SEQ ID NO: 3) | |
| ER, retention (KDEL) | KDEL[c] (SEQ ID NO: 4) | |
| Mitochondrial matrix | [n]MLSLRQSIRFFKPATRTLCSSRYLL | S. cerevisiae COX4 (P04037) |
| | (SEQ ID NO: 5) | |
| Plastid | [n]MVAMAMASLQSSMSSLSLSSNSFLGQ | Pisum sativum RPL24 (P11893) |
| | PLSPITLSPFLQG (SEQ ID NO: 6) | |
| Folded secretion (Tat) | (S/T)RRXFLK (SEQ ID NO: 7) | Near the N terminus[6] |
| peroxisome (PTS1) | SKL[c] (SEQ ID NO: 8) | |
| peroxisome (PTS2) | [c]XXXXRLXXXXXHL (SEQ ID NO: 9) | |

[0158] In certain embodiments, one or more (e.g., at least 3, or at least 8 antibodies) are expressed with the systems and methods herein. In some embodiments, this includes the therapeutic monoclonal antibodies (mAbs), Fabs, F(ab)2s, and scFv's that are shown in Table 4 below, as well as the anti-SARS-CoV2 antibodies and antigen bindings provided at Table 5 and Table 7, which is herein incorporated by reference.

TABLE 4

| Antibody Name | Trade name | Type | Source | Target | Use |
|---|---|---|---|---|---|
| 3F8 | | mab | mouse | GD2 ganglioside | neuroblastoma |
| 8H9 | | mab | mouse | B7-H3 | neuroblastoma, |
| | | | | | sarcoma, metastatic |
| | | | | | brain cancers |
| Abagovomab | | mab | mouse | CA-125 (imitation) | ovarian cancer |
| Abciximab | ReoPro | Fab | chimeric | CD41 (integrin | platelet aggregation |
| | | | | alpha-IIb) | inhibitor |
| Abituzumab | | mab | humanized | CD51 | cancer |
| Abrilumab | | mab | human | integrin α4β7 | inflammatory bowel |
| | | | | | disease, ulcerative |
| | | | | | colitis, Crohn's disease |
| Actoxumab | | mab | human | Clostridium | Clostridium difficile |
| | | | | difficile | colitis |
| Adalimumab | Humira | mab | human | TNF-α | Rheumatoid arthritis, |
| | | | | | Crohn's Disease, Plaque |
| | | | | | Psoriasis, Psoriatic |
| | | | | | Arthritis, Ankylosing |
| | | | | | Spondylitis, Juvenile |
| | | | | | Idiopathic Arthritis, |
| | | | | | Hemolytic disease of |
| | | | | | the newborn |
| Adecatumumab | | mab | human | EpCAM | prostate and breast |
| | | | | | cancer |
| Aducanumab | | mab | human | beta-amyloid | Alzheimer's disease |
| Afasevikumab | | mab | human | IL17A and IL17F | — |
| Afelimomab | | F(ab′)₂ | mouse | TNF-α | sepsis |
| Afutuzumab | | mab | humanized | CD20 | lymphoma |
| Alacizumab pegol | | F(ab′)₂ | humanized | VEGFR2 | cancer |
| ALD518 | | — | humanized | IL-6 | rheumatoid arthritis |
| Alemtuzumab | Lemtrada, | mab | humanized | CD52 | Multiple sclerosis |
| | Campath | | | | |
| Alirocumab | | mab | human | PCSK9 | hypercholesterolemia |
| Altumomab pentetate | Hybri-ceaker | mab | mouse | CEA | colorectal cancer |
| | | | | | (diagnosis) |
| Amatuximab | | mab | chimeric | mesothelin | cancer |
| Anatumomab | | Fab | mouse | TAG-72 | non-small cell lung |
| mafenatox | | | | | carcinoma |
| Anetumab ravtansine | | mab | human | MSLN | cancer |
| Anifrolumab | | mab | human | interferon α/β | systemic lupus |
| | | | | receptor | erythematosus |
| Anrukinzumab | | mab | humanized | IL-13 | asthma |
| (=IMA-638) | | | | | |
| Apolizumab | | mab | humanized | HLA-DR — | hematological cancers |
| Arcitumomab | CEA-Scan | Fab′ | mouse | CEA | gastrointestinal cancers |
| | | | | | (diagnosis) |
| Ascrinvacumab | | mab | human | activin receptor- | cancer |
| | | | | like kinase 1 | |
| Aselizumab | | mab | humanized | L-selectin | severely injured patients |
| | | | | (CD62L) | |
| Atezolizumab | | mab | humanized | CD274 | cancer |
| Atinumab | | mab | human | RTN4 | — |
| Atlizumab | Actemra, | mab | humanized | IL-6 receptor | rheumatoid arthritis |
| (=tocilizumab) | RoActemra | | | | |
| Atorolimumab | | mab | human | Rhesus factor | hemolytic disease of the |
| | | | | | newborn[citation |
| | | | | | needed] |
| Avelumab | | mab | human | CD274 | — |
| Bapineuzumab | | mab | humanized | beta amyloid | Alzheimer's disease |
| Basiliximab | Simulect | mab | chimeric | CD25 (α chain of | prevention of organ |
| | | | | IL-2 receptor) | transplant rejections |
| Bavituximab | | mab | chimeric | phosphatidylserine | cancer, viral infections |
| Bectumomab | LymphoScan | Fab | mouse | CD22 | non-Hodgkin's |
| | | | | | lymphoma (detection) |
| Begelomab | | mab | mouse | DPP4 | — |
| Belimumab | Benlysta, | mab | human | BAFF | non-Hodgkin |
| | Lympho Stat- | | | | lymphoma etc. |
| | B | | | | |
| Benralizumab | | mab | humanized | CD125 | asthma |
| Bertilimumab | | mab | human | CCL11 (eotaxin-1) | severe allergic disorders |
| Besilesomab | Scintimun | mab | mouse | CEA-related | inflammatory lesions |
| | | | | antigen | and metastases |
| | | | | | (detection) |
| Bevacizumab | Avastin | mab | humanized | VEGF-A | metastatic cancer, |
| | | | | | retinopathy of |
| | | | | | prematurity |
| Bezlotoxumab | | mab | human | Clostridium | Clostridium difficile |
| | | | | difficile | colitis |
| Biciromab | FibriScint | Fab′ | mouse | fibrin II, beta chain | thromboembolism |
| | | | | | (diagnosis) |
| Bimagrumab | | mab | human | ACVR2B | myostatin inhibitor |
| Bimekizumab | | mab | humanized | IL 17A and IL 17F | — |
| Bivatuzumab | | mab | humanized | CD44 v6 | squamous cell |
| mertansine | | | | | carcinoma |
| Bleselumab | | mab | human | CD40 | — |
| Blinatumomab | | BiTE | mouse | CD19 | pre-B ALL (CD19+) |
| Blontuvetmab | Blontress | mab | veterinary | CD20 | — |
| Blosozumab | | mab | humanized | SOST | osteoporosis |
| Bococizumab | | mab | humanized | neural apoptosis- | dyslipidemia |
| | | | | regulated | |
| | | | | proteinase 1 | |
| Brazikumab | | mab | human | IL23 | Crohn's disease |
| Brentuximab vedotin | | mab | chimeric | CD30 (TNFRSF8) | hematologic cancers |
| Briakinumab | | mab | human | IL-12, IL-23 | psoriasis, rheumatoid |
| | | | | | arthritis, inflammatory |
| | | | | | bowel diseases, |
| | | | | | multiple sclerosis |
| Brodalumab | | mab | human | IL-17 | inflammatory diseases |
| Brolucizumab | | mab | humanized | VEGFA | wet age-related macular |
| | | | | | degeneration |
| Brontictuzumab | | mab | humanized | Notch 1 | cancer |
| Burosumab | | mab | human | FGF 23 | X-linked |
| | | | | | hypophosphatemia |
| Cabiralizumab | | mab | humanized | CSF1R | — |
| Canakinumab | Ilaris | mab | human | IL-1 — | rheumatoid arthritis |
| Cantuzumab | | mab | humanized | mucin CanAg | colorectal cancer etc. |
| mertansine | | | | | |
| Cantuzumab | | mab | humanized | MUC1 | cancers |
| ravtansine | | | | | |
| Caplacizumab | | mab | humanized | VWF | thrombotic |
| | | | | | thrombocytopenic |
| | | | | | purpura, thrombosis |
| Capromab pendetide | Prostascint | mab | mouse | prostatic | prostate cancer |
| | | | | carcinoma cells | (detection) |
| Carlumab | | mab | human | MCP-1 | oncology/immune |
| | | | | | indications |
| Carotuximab | | mab | chimeric | endoglin | — |
| Catumaxomab | Removab | 3funct | rat/mouse | EpCAM, CD3 | ovarian cancer, |
| | | | hybrid | | malignant ascites, |
| | | | | | gastric cancer |
| cBR96-doxorubicin | | mab | humanized | Lewis-Y antigen | cancer |
| immunoconjugate | | | | | |
| Cedelizumab | | mab | humanized | CD4 | prevention of organ |
| | | | | | transplant rejections, |
| | | | | | treatment of |
| | | | | | autoimmune diseases |
| Cergutuzumab | | mab | humanized | IL2 | — |
| amunaleukin | | | | | |
| Certolizumab pegol | Cimzia | Fab′ | humanized | TNF-α | Crohn's disease |
| | | | | | Rheumatoid arthritis |
| | | | | | axial spondyloarthritis |
| | | | | | psoriasis arthritis |
| Cetuximab | Erbitux | mab | chimeric | EGFR | metastatic colorectal |
| | | | | | cancer and head and |
| | | | | | neck cancer |
| Ch.14.18 | | mab | chimeric | GD2 ganglioside | neuroblastoma |
| Citatuzumab bogatox | | Fab | humanized | EpCAM | ovarian cancer and |
| | | | | | other solid tumors |
| Cixutumumab | | mab | human | IGF-1 receptor | solid tumors |
| | | | | (CD221) | |
| Clazakizumab | | mab | humanized | Oryctolagus | rheumatoid arthritis |
| | | | | cuniculus | |
| Clenoliximab | | mab | chimeric | CD4 | rheumatoid arthritis |
| Clivatuzumab | hPAM4-Cide | mab | humanized | MUC1 | pancreatic cancer |
| tetraxetan | | | | | |
| Codrituzumab | | mab | humanized | glypican 3 | cancer |
| Coltuximab ravtansine | | mab | chimeric | CD19 | cancer |
| Conatumumab | | mab | human | TRAIL-R2 | cancer |
| Concizumab | | mab | humanized | TFPI | bleeding |
| CR6261 | | mab | human | Influenza A | infectious |
| | | | | hemagglutinin | disease/influenza A |
| Crenezumab | | mab | humanized | 1-40-β-amyloid | Alzheimer's disease |
| Crotedumab | | mab | human | GCGR | diabetes |
| Dacetuzumab | | mab | humanized | CD40 | hematologic cancers |
| Daclizumab | Zenapax | mab | humanized | CD25 (α chain of | prevention of organ |
| | | | | IL-2 receptor) | transplant rejections |
| Dalotuzumab | | mab | humanized | IGF-1 receptor | cancer etc. |
| | | | | (CD221) | |
| Dapirolizumab pegol | | mab | humanized | CD154 (CD40L) | — |
| Daratumumab | | mab | human | CD38 (cyclic ADP | cancer |
| | | | | ribose hydrolase) | |
| Dectrekumab | | mab | human | IL-13 | — |
| Demcizumab | | mab | humanized | DLL4 | cancer |
| Denintuzumab | | mab | humanized | CD19 | cancer |
| mafodotin | | | | | |
| Denosumab | Prolia | mab | human | RANKL | osteoporosis, bone |
| | | | | | metastases etc. |
| Depatuxizumab | | mab | chimeric/ | EGFR | cancer |
| mafodotin | | | humanized | | |
| Derlotuximab biotin | | mab | chimeric | histone complex | recurrent glioblastoma |
| | | | | | multiforme |
| Detumomab | | mab | mouse | B-lymphoma cell | lymphoma |
| Dinutuximab | | mab | chimeric | GD2 ganglioside | neuroblastoma |
| Diridavumab | | mab | human | hemagglutinin | influenza A |
| Domagrozumab | | mab | humanized | GDF-8 | Duchenne muscular |
| | | | | | dystrophy |
| Dorlimomab aritox | | F(ab′)₂ | mouse | — | — |
| Drozitumab | | mab | human | DR5 | cancer etc. |
| Duligotumab | | mab | human | ERBB3 (HER3) | testicular cancer |
| Dupilumab | | mab | human | IL4 | atopic diseases |
| Durvalumab | | mab | human | CD274 | cancer |
| Dusigitumab | | mab | human | ILGF2 | cancer |
| Ecromeximab | | mab | chimeric | GD3 ganglioside | malignant melanoma |
| Eculizumab | Soliris | mab | humanized | C5 | paroxysmal nocturnal |
| | | | | | hemoglobinuria, |
| | | | | | atypical HUS |
| Edobacomab | | mab | mouse | endotoxin | sepsis caused by Gram- |
| | | | | | negative bacteria |
| Edrecolomab | Panorex | mab | mouse | EpCAM | colorectal carcinoma |
| Efalizumab | Raptiva | mab | humanized | LFA-1 (CD11a) | psoriasis (blocks T-cell |
| | | | | | migration) |
| Efungumab | Mycograb | scFv | human | Hsp90 | invasive Candida |
| | | | | | infection |
| Eldelumab | | mab | human | interferon gamma- | Crohn's disease, |
| | | | | induced protein | ulcerative colitis |
| Elgemtumab | | mab | human | ERBB3 (HER3) | cancer |
| Elotuzumab | | mab | humanized | SLAMF7 | multiple myeloma |
| Elsilimomab | | mab | mouse | IL-6 | — |
| Emactuzumab | | mab | humanized | CSF1R | cancer |
| Emibetuzumab | | mab | humanized | HHGFR | cancer |
| Emicizumab | | mab | humanized | activated F9, F10 | haemophilia A |
| Enavatuzumab | | mab | humanized | TWEAK receptor | cancer etc. |
| Enfortumab vedotin | | mab | human | AGS-22M6 | cancer expressing |
| | | | | | Nectin-4 |
| Enlimomab pegol | | mab | mouse | ICAM-1 (CD54) | — |
| Enoblituzumab | | mab | humanized | CD276 | cancer |
| Enokizumab | | mab | humanized | IL9 | asthma |
| Enoticumab | | mab | human | DLL4 | — |
| Ensituximab | | mab | chimeric | 5AC | cancer |
| Epitumomab cituxetan | | mab | mouse | episialin | — |
| Epratuzumab | | mab | humanized | CD22 | cancer, SLE |
| Erenumab | | mab | human | CGRP | migraine |
| Erlizumab | | F(ab′)₂ | humanized | ITGB2 (CD18) | heart attack, stroke, |
| | | | | | traumatic shock |
| Ertumaxomab | Rexomun | 3funct | rat/mouse | HER2/neu, CD3 | breast cancer etc. |
| | | | hybrid | | |
| Etaracizumab | Abegrin | mab | humanized | integrin αvβ3 | melanoma, prostate |
| | | | | | cancer, ovarian cancer |
| | | | | | etc. |
| Etrolizumab | | mab | humanized | integrin α7 β7 | inflammatory bowel |
| | | | | | disease |
| Evinacumab | | mab | human | angiopoietin 3 | dyslipidemia |
| Evolocumab | | mab | human | PCSK9 | hypercholesterolemia |
| Exbivirumab | | mab | human | hepatitis B surface | hepatitis B |
| | | | | antigen | |
| Fanolesomab | NeutroSpec | mab | mouse | CD15 | appendicitis (diagnosis) |
| Faralimomab | | mab | mouse | interferon receptor | — |
| Farletuzumab | | mab | humanized | folate receptor 1 | ovarian cancer |
| Fasinumab | | mab | human | HNGF | acute sciatic pain |
| FBTA05 | Lymphomun | 3funct | rat/mouse | CD20 | chronic lymphocytic |
| | | | hybrid | | leukaemia |
| Felvizumab | | mab | humanized | respiratory | respiratory syncytial |
| | | | | syncytial virus | virus infection |
| Fezakinumab | | mab | human | IL-22 | rheumatoid arthritis, |
| | | | | | psoriasis |
| Fibatuzumab | | mab | humanized | ephrin receptor A3 | — |
| Ficlatuzumab | | mab | humanized | HGF | cancer etc. |
| Figitumumab | | mab | human | IGF-1 receptor | adrenocortical |
| | | | | (CD221) | carcinoma, non-small |
| | | | | | cell lung carcinoma etc. |
| Firivumab | | mab | human | influenza A virus | — |
| | | | | hemagglutinin | |
| Flanvotumab | | mab | human | TYRP1(glycoprote | melanoma |
| | | | | in 75) | |
| Fletikumab | | mab | human | IL 20 | rheumatoid arthritis |
| Fontolizumab | HuZAF | mab | humanized | IFN-γ | Crohn's disease etc. |
| Foralumab | | mab | human | CD3 epsilon | — |
| Foravirumab | | mab | human | rabies virus | rabies (prophylaxis) |
| | | | | glycoprotein | |
| Fresolimumab | | mab | human | TGF-β | idiopathic pulmonary |
| | | | | | fibrosis, focal |
| | | | | | segmental |
| | | | | | glomerulosclerosis, |
| | | | | | cancer |
| Fulranumab | | mab | human | NGF | pain |
| Futuximab | | mab | chimeric | EGFR | cancer |
| Galcanezumab | | mab | humanized | calcitonin | migraine |
| Galiximab | | mab | chimeric | CD80 | B-cell lymphoma |
| Ganitumab | | mab | human | IGF-1 receptor | cancer |
| | | | | (CD221) | |
| Gantenerumab | | mab | human | beta amyloid | Alzheimer's disease |
| Gavilimomab | | mab | mouse | CD147 (basigin) | graft versus host disease |
| Gemtuzumab | Mylotarg | mab | humanized | CD33 | acute myelogenous |
| ozogamicin | | | | | leukemia |
| Gevokizumab | | mab | humanized | IL-1β | diabetes etc. |
| Girentuximab | Rencarex | mab | chimeric | carbonic anhydrase | clear cell renal cell |
| | | | | 9 (CA-IX) | carcinoma[84] |
| Glembatumumab | | mab | human | GPNMB | melanoma, breast |
| vedotin | | | | | cancer |
| Golimumab | Simponi | mab | human | TNF-α | rheumatoid arthritis, |
| | | | | | psoriatic arthritis, |
| | | | | | ankylosing spondylitis |
| Gomiliximab | | mab | chimeric | CD23 (IgE | allergic asthma |
| | | | | receptor) | |
| Guselkumab | | mab | human | IL23 | psoriasis |
| Ibalizumab | | mab | humanized | CD4 | HIV infection |
| Ibritumomab tiuxetan | Zevalin | mab | mouse | CD20 | non-Hodgkin's |
| | | | | | lymphoma |
| Icrucumab | | mab | human | VEGFR-1 | cancer etc. |
| Idarucizumab | | mab | humanized | dabigatran | reversal of |
| | | | | | anticoagulant effects of |
| | | | | | dabigatran |
| Igovomab | Indimacis-125 | F(ab′)₂ | mouse | CA-125 | ovarian cancer |
| | | | | | (diagnosis) |
| IMAB362 | | mab | human | CLDN18.2 | gastrointestinal |
| | | | | | adenocarcinomas and |
| | | | | | pancreatic tumor |
| Imalumab | | mab | human | MIF | cancer |
| Imciromab | Myoscint | mab | mouse | cardiac myosin | cardiac imaging |
| Imgatuzumab | | mab | humanized | EGFR | cancer |
| Inclacumab | | mab | human | selectin P | cardiovascular disease |
| Indatuximab | | mab | chimeric | SDC1 | cancer |
| ravtansine | | | | | |
| Indusatumab vedotin | | mab | human | GUCY2C | cancer |
| Inebilizumab | | mab | humanized | CD19 | cancer, systemic |
| | | | | | sclerosis, multiple |
| | | | | | sclerosis |
| Infliximab | Remicade | mab | chimeric | TNF-α | rheumatoid arthritis, |
| | | | | | ankylosing spondylitis, |
| | | | | | psoriatic arthritis, |
| | | | | | psoriasis, Crohn's |
| | | | | | disease, ulcerative |
| | | | | | colitis |
| Inolimomab | | mab | mouse | CD25 (α chain of | graft versus host disease |
| | | | | IL-2 receptor) | |
| Inotuzumab | | mab | humanized | CD22 | ALL |
| ozogamicin | | | | | |
| Intetumumab | | mab | human | CD51 | solid tumors (prostate |
| | | | | | cancer, melanoma) |
| Ipilimumab | Yervoy | mab | human | CD152 | melanoma |
| Iratumumab | | mab | human | CD30 (TNFRSF8) | Hodgkin's lymphoma |
| Isatuximab | | mab | chimeric | CD38 | cancer |
| Itolizumab | | mab | humanized | CD6 | — |
| Ixekizumab | | mab | humanized | IL 17A | autoimmune diseases |
| Keliximab | | mab | chimeric | CD4 | chronic asthma |
| Labetuzumab | CEA-Cide | mab | humanized | CEA | colorectal cancer |
| Lampalizumab | | mab | humanized | CFD | geographic atrophy |
| | | | | | secondary to age-related |
| | | | | | macular degeneration |
| Lanadelumab | | mab | human | kallikrein | angioedema |
| Landogrozumab | | mab | humanized | GDF-8 | muscle wasting |
| | | | | | disorders |
| Laprituximab | | mab | chimeric | EGFR | — |
| emtansine | | | | | |
| Lebrikizumab | | mab | humanized | IL-13 | asthma |
| Lemalesomab | | mab | mouse | NCA-90 | diagnostic agent |
| | | | | (granulocyte | |
| | | | | antigen) | |
| Lendalizumab | | mab | humanized | C5 | — |
| Lenzilumab | | mab | human | CSF2 | — |
| Lerdelimumab | | mab | human | TGF beta 2 | reduction of scarring |
| | | | | | after glaucoma surgery |
| Lexatumumab | | mab | human | TRAIL-R2 | cancer |
| Libivirumab | | mab | human | hepatitis B surface | hepatitis B |
| | | | | antigen | |
| Lifastuzumab vedotin | | mab | humanized | phosphate-sodium | cancer |
| | | | | co-transporter | |
| Ligelizumab | | mab | humanized | IGHE | severe asthma and |
| | | | | | chronic spontaneous |
| | | | | | urticaria |
| Lilotomab satetraxetan | | mab | mouse | CD37 | cancer |
| Lintuzumab | | mab | humanized | CD33 | cancer |
| Lirilumab | | mab | human | KIR2D | solid and hematological |
| | | | | | cancers |
| Lodelcizumab | | mab | humanized | PCSK9 | hypercholesterolemia |
| Lokivetmab | | mab | veterinary | Canis lupus | — |
| | | | | familiaris IL31 | |
| Lorvotuzumab | | mab | humanized | CD56 | cancer |
| mertansine | | | | | |
| Lucatumumab | | mab | human | CD40 | multiple myeloma, non- |
| | | | | | Hodgkin's lymphoma, |
| | | | | | Hodgkin's lymphoma |
| Lulizumab pegol | | mab | humanized | CD28 | autoimmune diseases |
| Lumiliximab | | mab | chimeric | CD23 (IgE | chronic lymphocytic |
| | | | | receptor) | leukemia |
| Lumretuzumab | | mab | humanized | ERBB3 (HER3) | cancer |
| MABp1 | Xilonix | mab | human | IL1A | colorectal cancer |
| Mapatumumab | | mab | human | TRAIL-R1 | cancer |
| Margetuximab | | mab | humanized | ch4D5 | cancer |
| Maslimomab | | — | mouse | T-cell receptor | — |
| Matuzumab | | mab | humanized | EGFR | colorectal, lung and |
| | | | | | stomach cancer |
| Mavrilimumab | | mab | human | GMCSF receptor | rheumatoid arthritis |
| | | | | α-chain | |
| Mepolizumab | Bosatria | mab | humanized | IL-5 | asthma and white blood |
| | | | | | cell diseases |
| Metelimumab | | mab | human | TGF beta 1 | systemic scleroderma |
| Milatuzumab | | mab | humanized | CD74 | multiple myeloma and |
| | | | | | other hematological |
| | | | | | malignancies |
| Minretumomab | | mab | mouse | TAG-72 | tumor detection (and |
| | | | | | therapy—) |
| Mirvetuximab | | mab | chimeric | folate receptor | cancer |
| soravtansine | | | | alpha | |
| Mitumomab | | mab | mouse | GD3 ganglioside | small cell lung |
| | | | | | carcinoma |
| Mogamulizumab | | mab | humanized | CCR4 | cancer |
| Monalizumab | | mab | humanized | KLRC1 | — |
| Morolimumab | | mab | human | Rhesus factor | — |
| Motavizumab | Numax | mab | humanized | respiratory | respiratory syncytial |
| | | | | syncytial virus | virus (prevention) |
| Moxetumomab | | mab | mouse | CD22 | cancer |
| pasudotox | | | | | |
| Muromonab-CD3 | Orthoclone | mab | mouse | CD3 | prevention of organ |
| | OKT3 | | | | transplant rejections |
| Nacolomab tafenatox | | Fab | mouse | C242 antigen | colorectal cancer |
| Namilumab | | mab | human | CSF2 | — |
| Naptumomab | | Fab | mouse | 5T4 | non-small cell lung |
| estafenatox | | | | | carcinoma, renal cell |
| | | | | | carcinoma |
| Naratuximab | | mab | chimeric | CD37 | — |
| emtansine | | | | | |
| Narnatumab | | mab | human | RON | cancer |
| Natalizumab | Tysabri | mab | humanized | integrin α4 | multiple sclerosis, |
| | | | | | Crohn's disease |
| Navicixizumab | | mab | chimeric/ | DLL4 | — |
| | | | humanized | | |
| Navivumab | | mab | human | influenza A virus | — |
| | | | | hemagglutinin HA | |
| Nebacumab | | mab | human | endotoxin | sepsis |
| Necitumumab | | mab | human | EGFR | non-small cell lung |
| | | | | | carcinoma |
| Nemolizumab | | mab | humanized | IL31RA | eczema[106] |
| Nerelimomab | | mab | mouse | TNF-α | — |
| Nesvacumab | | mab | human | angiopoietin 2 | cancer |
| Nimotuzumab | Theracim, | mab | humanized | EGFR | squamous cell |
| | Theraloc | | | | carcinoma, head and |
| | | | | | neck cancer, |
| | | | | | nasopharyngeal cancer, |
| | | | | | glioma |
| Nivolumab | Opdivo | mab | human | PD-1 | cancer |
| Nofetumomab | Verluma | Fab | mouse | — | cancer (diagnosis) |
| merpentan | | | | | |
| Obiltoxaximab | | mab | chimeric | Bacillus anthracis | Bacillus anthracis |
| | | | | anthrax | spores |
| Obinutuzumab | Gazyva | mab | humanized | CD20 | Chronic lymphatic |
| | | | | | leukemia |
| Ocaratuzumab | | mab | humanized | CD20 | cancer |
| Ocrelizumab | | mab | humanized | CD20 | rheumatoid arthritis, |
| | | | | | lupus erythematosus |
| | | | | | etc. |
| Odulimomab | | mab | mouse | LFA-1 (CD11a) | prevention of organ |
| | | | | | transplant rejections, |
| | | | | | immunological diseases |
| Ofatumumab | Arzerra | mab | human | CD20 | chronic lymphocytic |
| | | | | | leukemia etc. |
| Olaratumab | | mab | human | PDGF-R α | cancer |
| Olokizumab | | mab | humanized | IL6 | — |
| Omalizumab | Xolair | mab | humanized | IgE Fc region | allergic asthma |
| Onartuzumab | | mab | humanized | human scatter | cancer |
| | | | | factor receptor | |
| | | | | kinase | |
| Ontuxizumab | | mab | chimeric/ | TEM1 | cancer |
| | | | humanized | | |
| Opicinumab | | mab | human | LINGO-1 | multiple sclerosis |
| Oportuzumab monatox | | scFv | humanized | EpCAM | cancer |
| Oregovomab | OvaRex | mab | mouse | CA-125 | ovarian cancer |
| Orticumab | | mab | human | oxLDL | — |
| Otelixizumab | | mab | chimeric/ | CD3 | diabetes mellitus type 1 |
| | | | humanized | | |
| Otlertuzumab | | mab | humanized | CD37 | cancer |
| Oxelumab | | mab | human | OX-40 | asthma |
| Ozanezumab | | mab | humanized | NOGO-A | ALS and multiple |
| | | | | | sclerosis |
| Ozoralizumab | | mab | humanized | TNF-α | inflammation |
| Pagibaximab | | mab | chimeric | lipoteichoic acid | sepsis (Staphylococcus) |
| Palivizumab | Synagis, | mab | humanized | F protein of | respiratory syncytial |
| | Abbosynagis | | | respiratory | virus (prevention) |
| | | | | syncytial virus | |
| Pamrevlumab | | mab | human | CTGF | — |
| Panitumumab | Vectibix | mab | human | EGFR | colorectal cancer |
| Pankomab | | mab | humanized | tumor specific | ovarian cancer |
| | | | | glycosylation of | |
| | | | | MUC1 | |
| Panobacumab | | mab | human | Pseudomonas | Pseudomonas |
| | | | | aeruginosa | aeruginosa infection |
| Parsatuzumab | | mab | human | EGFL7 | cancer |
| Pascolizumab | | mab | humanized | IL-4 | asthma |
| Pasotuxizumab | | mab | chimeric/ | folate hydrolase | cancer |
| | | | humanized | | |
| Pateclizumab | | mab | humanized | LTA | TNF |
| Patritumab | | mab | human | ERBB3 (HER3) | cancer |
| Pembrolizumab | | mab | humanized | PDCD1 | melanoma and other |
| | | | | | cancers |
| Pemtumomab | Theragyn | — | mouse | MUCI | cancer |
| Perakizumab | | mab | humanized | IL 17A | arthritis |
| Pertuzumab | Omnitarg | mab | humanized | HER2/neu | cancer |
| Pexelizumab | | scFv | humanized | C5 | reduction of side effects |
| | | | | | of cardiac surgery |
| Pidilizumab | | mab | humanized | PD-1 | cancer and infectious |
| | | | | | diseases |
| Pinatuzumab vedotin | | mab | humanized | CD22 | cancer |
| Pintumomab | | mab | mouse | adenocarcinoma | adenocarcinoma |
| | | | | antigen | (imaging) |
| Placulumab | | mab | human | human TNF | pain and inflammatory |
| | | | | | diseases |
| Plozalizumab | | mab | humanized | CCR2 | diabetic nephropathy |
| | | | | | and arteriovenous graft |
| | | | | | patency |
| Pogalizumab | | mab | humanized | TNFR superfamily | — |
| | | | | member 4 | |
| Polatuzumab vedotin | | mab | humanized | CD79B | cancer |
| Ponezumab | | mab | humanized | human beta- | Alzheimer's disease |
| | | | | amyloid | |
| Prezalizumab | | mab | humanized | ICOSL | — |
| Priliximab | | mab | chimeric | CD4 | Crohn's disease, |
| | | | | | multiple sclerosis |
| Pritoxaximab | | mab | chimeric | E. coli shiga toxin | — |
| | | | | type-1 | |
| Pritumumab | | mab | human | vimentin | brain cancer |
| PRO 140 | | — | humanized | CCR5 | HIV infection |
| Quilizumab | | mab | humanized | IGHE | asthma |
| Racotumomab | | mab | mouse | N- | cancer |
| | | | | glycolylneuraminic | |
| | | | | acid | |
| Radretumab | | mab | human | fibronectin extra | cancer |
| | | | | domain-B | |
| Rafivirumab | | mab | human | rabies virus | rabies (prophylaxis) |
| | | | | glycoprotein | |
| Ralpancizumab | | mab | humanized | neural apoptosis- | dyslipidemia |
| | | | | regulated | |
| | | | | proteinase 1 | |
| Ramucirumab | Cyramza | mab | human | VEGFR2 | solid tumors |
| Ranibizumab | Lucentis | Fab | humanized | VEGF-A | macular degeneration |
| | | | | | (wet form) |
| Raxibacumab | | mab | human | anthrax toxin, | anthrax (prophylaxis |
| | | | | protective antigen | and treatment) |
| Refanezumab | | mab | humanized | myelin-associated | recovery of motor |
| | | | | glycoprotein | function after stroke |
| Regavirumab | | mab | human | cytomegalovirus | cytomegalovirus |
| | | | | glycoprotein B | infection |
| Reslizumab | | mab | humanized | IL-5 | inflammations of the |
| | | | | | airways, skin and |
| | | | | | gastrointestinal tract |
| Rilotumumab | | mab | human | HGF | solid tumors |
| Rinucumab | | mab | human | platelet-derived | neovascular age-related |
| | | | | growth factor | macular degeneration |
| | | | | receptor beta | |
| Risankizumab | | mab | humanized | IL23A | — |
| Rituximab | MabThera, | mab | chimeric | CD20 | lymphomas, leukemias, |
| | Rituxan | | | | some autoimmune |
| | | | | | disorders |
| Rivabazumab pegol | | mab | humanized | Pseudomonas | — |
| | | | | aeruginosa type III | |
| | | | | secretion system | |
| Robatumumab | | mab | human | IGF-1 receptor | cancer |
| | | | | (CD221) | |
| Roledumab | | mab | human | RHD | — |
| Romosozumab | | mab | humanized | sclerostin | osteoporosis |
| Rontalizumab | | mab | humanized | IFN-α | systemic lupus |
| | | | | | erythematosus |
| Rovalpituzumab | | mab | humanized | DLL3 | — |
| tesirine | | | | | |
| Rovelizumab | LeukArrest | mab | humanized | CD11, CD18 | haemorrhagic shock etc. |
| Ruplizumab | Antova | mab | humanized | CD154 (CD40L) | rheumatic diseases |
| Sacituzumab govitecan | | mab | humanized | tumor-associated | cancer |
| | | | | calcium signal | |
| | | | | transducer 2 | |
| Samalizumab | | mab | humanized | CD200 | cancer |
| Sapelizumab | | mab | humanized | IL6R | — |
| Sarilumab | | mab | human | IL6 | rheumatoid arthritis, |
| | | | | | ankylosing spondylitis |
| Satumomab pendetide | | mab | mouse | TAG-72 | cancer (diagnosis) |
| Secukinumab | | mab | human | IL 17A | uveitis, rheumatoid |
| | | | | | arthritis psoriasis |
| Seribantumab | | mab | human | ERBB3 (HER3) | cancer |
| Setoxaximab | | mab | chimeric | E. coli shiga toxin | — |
| | | | | type-2 | |
| Sevirumab | | — | human | cytomegalovirus | cytomegalovirus |
| | | | | | infection |
| SGN-CD19A | | mab | humanized | CD19 | acute lymphoblastic |
| | | | | | leukemia and B-cell |
| | | | | | non-Hodgkin |
| | | | | | lymphoma |
| SGN-CD33A | | mab | humanized | CD33 | Acute myeloid |
| | | | | | leukemia |
| Sibrotuzumab | | mab | humanized | FAP | cancer |
| Sifalimumab | | mab | humanized | IFN-α | SLE, dermatomyositis, |
| | | | | | polymyositis |
| Siltuximab | | mab | chimeric | IL-6 | cancer |
| Simtuzumab | | mab | humanized | LOXL2 | fibrosis |
| Siplizumab | | mab | humanized | CD2 | psoriasis, graft-versus- |
| | | | | | host disease |
| | | | | | (prevention) |
| Sirukumab | | mab | human | IL-6 | rheumatoid arthritis |
| Sofituzumab vedotin | | mab | humanized | CA-125 | ovarian cancer |
| Solanezumab | | mab | humanized | beta amyloid | Alzheimer's disease |
| Solitomab | | BiTE | mouse | EpCAM | — |
| Sonepcizumab | | — | humanized | sphingosine-1- | choroidal and retinal |
| | | | | phosphate | neovascularization |
| Sontuzumab | | mab | humanized | episialin | — |
| Stamulumab | | mab | human | myostatin | muscular dystrophy |
| Sulesomab | LeukoScan | Fab′ | mouse | NCA-90 | osteomyelitis (imaging) |
| | | | | (granulocyte | |
| | | | | antigen) | |
| Suvizumab | | mab | humanized | HIV-1 | viral infections |
| Tabalumab | | mab | human | BAFF | B-cell cancers |
| Tacatuzumab | AFP-Cide | mab | humanized | alpha-fetoprotein | cancer |
| tetraxetan | | | | | |
| Tadocizumab | | Fab | humanized | integrin αIIbβ3 | percutaneous coronary |
| | | | | | intervention |
| Talizumab | | mab | humanized | IgE | allergic reaction |
| Tamtuvetmab | Tactress | mab | veterinary | CD52 | — |
| Tanezumab | | mab | humanized | NGF | pain |
| Taplitumomab paptox | | mab | mouse | CD19 | cancer[citation needed] |
| Tarextumab | | mab | human | Notch receptor | cancer |
| Tefibazumab | Aurexis | mab | humanized | clumping factor A | Staphylococcus aureus |
| | | | | | infection |
| Telimomab aritox | | Fab | mouse | — | — |
| Tenatumomab | | mab | mouse | tenascin C | cancer |
| Teneliximab | | mab | chimeric | CD40 | autoimmune diseases |
| | | | | | and prevention of organ |
| | | | | | transplant rejection |
| Teplizumab | | mab | humanized | CD3 | diabetes mellitus type 1 |
| Teprotumumab | | mab | human | IGF-1 receptor | hematologic tumors |
| | | | | (CD221) | |
| Tesidolumab | | mab | human | C5 | — |
| Tetulomab | | mab | humanized | CD37 | cancer[141] |
| Tezepelumab | | mab | human | TSLP | asthma, atopic |
| | | | | | dermatitis |
| TGN1412 | | — | humanized | CD28 | chronic lymphocytic |
| | | | | | leukemia, rheumatoid |
| | | | | | arthritis |
| Ticilimumab | | mab | human | CTLA-4 | cancer |
| (=tremelimumab) | | | | | |
| Tigatuzumab | | mab | humanized | TRAIL-R2 | cancer |
| Tildrakizumab | | mab | humanized | IL23 | immunologically |
| | | | | | mediated inflammatory |
| | | | | | disorders |
| Timolumab | | mab | human | AOC3 | — |
| Tisotumab vedotin | | mab | human | coagulation factor | — |
| | | | | III | |
| TNX-650 | | — | humanized | IL-13 | Hodgkin's lymphoma |
| Tocilizumab | Actemra, | mab | humanized | IL-6 receptor | rheumatoid arthritis |
| (=atlizumab) | RoActemra | | | | |
| Toralizumab | | mab | humanized | CD154 (CD40L) | rheumatoid arthritis, |
| | | | | | lupus nephritis etc. |
| Tosatoxumab | | mab | human | Staphylococcus | — |
| | | | | aureus | |
| Tositumomab | Bexxar | — | mouse | CD20 | follicular lymphoma |
| Tovetumab | | mab | human | CD140a | cancer |
| Tralokinumab | | mab | human | IL-13 | asthma etc. |
| Trastuzumab | Herceptin | mab | humanized | HER2/neu | breast cancer |
| Trastuzumab | Kadcyla | mab | humanized | HER2/neu | breast cancer |
| emtansine | | | | | |
| TRBS07 | Ektomab | 3funct | — | GD2 ganglioside | melanoma |
| Tregalizumab | | mab | humanized | CD4 | — |
| Tremelimumab | | mab | human | CTLA-4 | cancer |
| Trevogrumab | | mab | human | growth | muscle atrophy due to |
| | | | | differentiation | orthopedic disuse and |
| | | | | factor 8 | sarcopenia |
| Tucotuzumab | | mab | humanized | EpCAM | cancer |
| celmoleukin | | | | | |
| Tuvirumab | | — | human | hepatitis B virus | chronic hepatitis B |
| Ublituximab | | mab | chimeric | MS4A1 | cancer |
| Ulocuplumab | | mab | human | CXCR4 (CD184) | hematologic |
| | | | | | malignancies |
| Urelumab | | mab | human | 4-1BB (CD137) | cancer etc. |
| Urtoxazumab | | mab | humanized | Escherichia coli | diarrhoea caused by E. |
| | | | | | coli |
| Ustekinumab | Stelara | mab | human | IL-12, IL-23 | multiple sclerosis, |
| | | | | | psoriasis, psoriatic |
| | | | | | arthritis |
| Utomilumab | | mab | human | 4-1BB (CD137) | cancer |
| Vadastuximab talirine | | mab | chimeric | CD33 | — |
| Vandortuzumab | | mab | humanized | STEAP1 | cancer |
| vedotin | | | | | |
| Vantictumab | | mab | human | Frizzled receptor | cancer |
| Vanucizumab | | mab | humanized | angiopoietin 2 | cancer |
| Vapaliximab | | mab | chimeric | AOC3 (VAP-1) | — |
| Varlilumab | | mab | human | CD27 | solid tumors and |
| | | | | | hematologic |
| | | | | | malignancies |
| Vatelizumab | | mab | humanized | ITGA2 (CD49b) | |
| Vedolizumab | Entyvio | mab | humanized | integrin α4β7 | Crohn's disease, |
| | | | | | ulcerative colitis |
| Veltuzumab | | mab | humanized | CD20 | non-Hodgkin's |
| | | | | | lymphoma |
| Vepalimomab | | mab | mouse | AOC3 (VAP-1) | inflammation |
| Vesencumab | | mab | human | NRP1 | solid malignancies |
| Visilizumab | Nuvion | mab | humanized | CD3 | Crohn's disease, |
| | | | | | ulcerative colitis |
| Vobarilizumab | | mab | humanized | IL6R | inflammatory |
| | | | | | autoimmune diseases |
| Volociximab | | mab | chimeric | integrin α5β1 | solid tumors |
| Vorsetuzumab | | mab | humanized | CD70 | cancer |
| mafodotin | | | | | |
| Votumumab | HumaSPECT | mab | human | tumor antigen | colorectal tumors |
| | | | | CTAA16.88 | |
| Xentuzumab | | mab | | IGF1, IGF2 | — |
| Zalutumumab | HuMax-EGFr | mab | human | EGFR | squamous cell |
| | | | | | carcinoma of the head |
| | | | | | and neck |
| Zanolimumab | HuMax-CD4 | mab | human | CD4 | rheumatoid arthritis, |
| | | | | | psoriasis, T-cell |
| | | | | | lymphoma |
| Zatuximab | | mab | chimeric | HER1 | cancer |
| Ziralimumab | | mab | human | CD147 (basigin) | — |
| Zolimomab aritox | | mab | mouse | CD5 | systemic lupus |
| | | | | | erythematosus, graft- |
| | | | | | versus-host disease |

TABLE 5

| Sponsors | Drug code | Trial IDs |
|---|---|---|
| Celltrion | CT-P63 | NCT05017168 |
| Exevir Bio BV | XVR011 | NCT04884295 |
| Jemincare Group | JMB2002 | ChiCTR2100042150 |
| Luye Pharma Group Ltd | LY-CovMab | NA |
| AbbVie | ABBV-47D11 | NCT04644120 |
| HiFiBiO Therapeutics | HFB30132A | NCT04590430 |
| Ology Bioservices | ADM03820 | NCT04592549 |
| Beigene | DXP604 | NCT04669262 |
| Zydus Cadila | ZRC-3308 | NA |
| Hengenix Biotech Inc | HLX70 | NCT04561076 |
| CORAT Therapeutics | COR-101 | NCT04674566 |
| Vir Biotechnol./ | VIR-7832 | NCT04746183 |
| AbCellera/Eli Lilly and | LY-CoV1404, | NCT04634409 |
| Company | LY3853113 | |
| Sorrento Therapeutics, Inc. | COVI-AMG (STI-2020) | NCT04734860 |
| Beigene | DXP593 | NCT04532294; |
| | | NCT04551898 |
| Junshi Biosciences/Eli Lilly | andJS016, LY3832479, LY- | NCT04441918; |
| Company | CoV016 | NCT04441931; |
| | | NCT04427501 |
| Mabwell (Shanghai) Bioscience | MW33 | NCT04533048; |
| Co., Ltd. | | NCT04627584 |
| Toscana Life Sciences Sviluppo | MAD0004J08 | NCT04932850; |
| s.r.l. | | NCT04952805 |
| Bristol-Myers Squibb, | C144-LS and C-135-LS | NCT04700163; |
| Rockefeller University | | Activ-2 study |
| Sinocelltech Ltd. | SCTA01 | NCT04483375; |
| | | NCT04644185 |
| Adagio Therapeutics | ADG20 | NCT04805671 |
| | | NCT04859517 |
| Brii Biosciences | BRII-196 | NCT04479631; |
| | | Activ-3 study |
| Brii Biosciences | BRII-198 | NCT04479644; |
| | | Activ-3 study |
| Tychan Pte. Ltd. | TY027 | NCT04429529; |
| | | NCT04649515 |
| AstraZeneca | AZD7442 (AZD8895 + | NCT04507256; |
| | AZD1061) | NCT04625725; |
| | | NCT04625972 |
| Celltrion | CT-P59 | NCT04525079; |
| | | NCT04593641; |
| | | NCT04602000 |
| Vir Biotechnol./ | VIR-7831/ | NCT04545060; |
| GlaxoSmithKline | GSK4182136 | Activ-3 study |
| AbCellera/Eli Lilly and | LY-CoV555 | NCT04411628 (Phase |
| Company | (LY3819253); | 1); NCT04427501 (Phase 2); |
| | combination of LY- | NCT04497987 |
| | CoV555 with LY- | (Phase 3); |
| | CoV016 (LY3832479) | NCT04501978 (Activ-3 study); |
| | | NCT04518410 (Phase 2/3) |
| Regeneron | REGN-COV2 | NCT04425629 (Phase |
| | (REGN10933 + | 1/2); NCT04426695 (Phase |
| | REGN10987) | 1/2); NCT04452318 (Phase 3) |

In certain embodiments, an agent, such as an anti-inflammatory agent or bioactive lipid, is used to increase the expression level and/or duration of any the therapeutic protein (or biologically active nucleic acid molecules) expressed from the non-viral vectors in the methods herein. In work conducted during the development of embodiments, herein, the anti-inflammatory agents (AILs) and bioactive lipids in Table 6 below were tested, and the ones in black were found to be successful agents.

TABLE 6
AILs and bioactive lipids tested

| | | |
|---|---|---|
| Docosahexaenoic Acid | (DHA) | 3/10/15% |
| Eicosapenaenoic Acid | (EPA) | 10/15% |
| Alpha Linolenic Acid | (ALA) | 3/10/15% |
| Maresin 1 | (MAR1) | 3% |
| Lipoxin A4 | (LA4) | 2% |
| 15-deoxy-12,14-Prostaglandin J2 | (15d) | 3% |
| Arachidonic Acid | (AA) | 10/15% |
| Eicosatetraynoic Acid | (ETA) | 10% |
| Docosapentaenoic Acid | (DPA) | 10/15% |
| Stearidonic Acid | (SA) | 10% |
| Retinoic Acid | (RA) | 10% |
| Trans Retinal | (TA) | 10% |
| 2-Arachidonoyl Glycerol | (AG) | 10% |
| Diallyl Disulfide | (DADS) | 10% |
| 3,3 Diindolylmethane | (DIM) | 10% |
| Prostaglandin E2 | (PE2) | 10% |
| Oleic Acid | (OA) | 5/10/15/30/50% |
| Alpha Tocopherol | (AT) | 2.5% |
| Sphingosine-1-Phosphate | (S-1-P) | 10% |
| Palmitoyl Sphingomyelin | (SPH) | 10% |

Red = Unsuccessful in Culture

### EXAMPLES

[0159] In the Examples below, the dexamethasone is water-soluble dexamethasone which contains dexamethasone complexed to cyclodextrin to make it soluble. The dexamethasone palmitate is dexamethasone 21-palmitate.

### Example 1

### Multiple-MAb Expression

[0160] This Example describes in vivo expression of multiple unique monoclonal antibodies following serial treatments in mice over a 4 week treatment course.

[0161] Experimental Methods: On day 0, three mice per group were given IP injections of dexamethasone (40 mg/kg) two hours prior to sequential IV injection of lipids (1000 nmol DOTAP SUV with 2.5 mol % dexamethasone palmitate and 1000 nmol DMPC (1,2-Dimyristoyl-SN-glycero-3-phosphocholine) neutral lipid with 5 mol % dexamethasone palmitate), followed two hours later by 75 mg of a single plasmid DNA (pDNA) containing 5J8 and anti-IL5 cDNAs (“5J8-IL5”). These mice were again re-treated on days 7, 14, and 21 with IP dexamethasone and IV lipid and sequential pDNA as before, however with pDNA(s) containing the following cDNAs at indicated doses: Day 7: 88 mg B38-lambda anti-CoV2 “B38 Lambda”, Day 14: 44 mg B38-lambda anti-CoV2, and 44 mg of a single pDNA containing two copies of anti-IL5 cDNA (IL5-IL5), Day 21: 44 mg rituximab (aCD20 dual), and 44 mg H4 anti-CoV2 (“H4”). Serum levels of mAb proteins were measured by ELISA 24 hours after each treatment and every 2-3 weeks thereafter. Group mean+/−SEM serum levels of target proteins are shown in the graph. The displayed “Days after injection” time points are all relative to the initial injection of pDNA containing 5J8 and anti-IL5 cDNAs at Day 0.

[0162] The results are shown in FIG. 1, and demonstrate that serial injection of different DNA mAb vectors on a weekly basis can produce ongoing therapeutic levels of four different intact monoclonal antibodies in individual mice.

### Example 2

### Multiple-MAb Expression

[0163] This Example describes in vivo expression of multiple unique monoclonal antibodies following serial treatments in mice over a 6 week treatment course.

[0164] Experimental methods: On day 0, three mice per group were given IP injections of dexamethasone (40 mg/kg) two hours prior to sequential IV injection of lipids (1000 nmol DOTAP SUV with 2.5 mol % dexamethasone palmitate and 1000 nmol DMPC (1,2-Dimyristoyl-SN-glycero-3-phosphocholine) neutral lipid with 5 mol % dexamethasone palmitate), followed two hours later by 44 mg each of pDNA containing anti-IL5 and 5J8 cDNAs (“aIL5+5J8”). These same mice were similarly re-treated on days 7, 14, with IP dexamethasone and IV lipid and sequential pDNA as before, however with pDNA(s) containing the following cDNAs at indicated doses: Day 7: 75 mg of the anti-Sars-Cov-2 monoclonal antibody B38 Kappa cDNA (“B38-Kappa”), Day 14: 44 mg of a single pDNA containing two copies of rituximab cDNA (“aCD20-aCD20”), and 44 mg of a single pDNA containing two copies of 5J8 (“5J8-5J8”). Serum levels of mAb proteins were measured by ELISA 24 hours one day following the second treatment (day 8) and every 1-2 weeks thereafter. Group mean+/−SEM serum levels of target proteins are shown in the graph. The indicated time points are all relative to the initial injection of pDNAs-containing anti-IL5 and 5J8 cDNAs at Day 0.

[0165] Results are shown in FIG. 2, and demonstrate that serial injection of different DNA mAb vectors injected on a weekly basis can produce ongoing therapeutic levels of four different intact monoclonal antibodies in individual mice.

### Example 3

### Multiple-MAb Expression

[0166] This Example describes in vivo expression of multiple unique monoclonal antibodies following serial treatments in mice over a 3 week treatment course.

[0167] Experimental Methods:

[0168] With regard to FIG. 3A: On day 0, 4 groups of three mice per group were given IP injections of dexamethasone (40 mg/kg) two hours prior to sequential IV injection of lipids (1000 nmol DOTAP SUV with 2.5 mol % dexamethasone palmitate and 1000 nmol DMPC (1,2-Dimyristoyl-SN-glycero-3-phosphocholine) neutral lipid with 5 mol % dexamethasone palmitate), followed two hours later by 75 mg of one of four separate pDNA containing anti-Sars-Cov-2 monoclonal antibody B38 cDNA as follows: Group 1: B38-Lambda-BV3, Group 2: modSE3-2-mCMV-B38-BV3, Group 3: modSE3-2-hCMV-B38-BV3, and Group 4: B38-Kappa-BV3. Serum levels of anti-CoV2 mAb proteins were measured by ELISA 24 hours after the initial treatment, and are displayed as group mean+/−SEM.

[0169] With regard to FIG. 3B: These same mice were similarly treated on days 7 and 14 with IP dexamethasone and IV lipid and sequential pDNA as before, however with pDNA(s) containing the following cDNAs at indicated doses: Day 7: 44 mg anti-TL5 (“aIL5”) and 44 mg 5J8 (“5J8”). Day 14: 88 mg rituximab (“aCD20 Dual”).

[0170] Serum levels of anti-CoV2 mAb proteins were measured by ELISA 24 hours after the initial treatment and weekly thereafter. Serum levels of anti-IL5, 5J8, and rituximab were determined on days 22 and 29, and are displayed as group mean+/−SEM. The indicated time points in FIGS. 3A and 3B are all relative to the initial injection of pDNAs-containing anti-IL5 and 5J8 cDNAs at Day 0.

[0171] These results, shown in FIGS. 3A and 3B, demonstrate: A) that various configurations of pDNA expression vectors result in disparate expression levels of target proteins, and B) that serial injection of pDNA mAb vectors encoding for different mAb clones can produce significant ongoing serum levels of four different intact monoclonal antibodies in individual mice.

### Example 4

### Multiple-MAb Expression

[0172] This Example describes in vivo expression of multiple unique monoclonal antibodies following serial treatments in mice over a 3 week Treatment Course.

[0173] Experimental methods: On day 0, three groups of mice each containing three mice per group, were similarly given IP injections of dexamethasone (40 mg/kg) two hours prior to sequential IV injection of lipids (1000 nmol DOTAP SUV with 2.5 mol % dexamethasone palmitate and 1000 nmol DMPC (1,2-Dimyristoyl-SN-glycero-3-phosphocholine) neutral lipid) with 5 mol % dexamethasone palmitate, followed by the following pDNA(s) containing the following cDNAs at indicated doses: 44 mg of a single pDNA containing two copies of 5J8 cDNA (“5J8-5J8”), and 44 mg of a single pDNA containing two copies of anti-IL5 cDNA (“aIL5-aIL5”). These same groups of mice were treated on days 7, 14, with IP dexamethasone and IV lipid and sequential pDNA as before, however with pDNA(s) containing the following cDNAs at indicated doses: Group 1: Day 7-44 mg of rituximab cDNA (“aCD20-dual”) and 44 mg of the B38 anti-SARS CoV2 cDNAs (“B38-Tag”), Day 14-88 mg of the anti-Sars-Cov-2 monoclonal antibody (“H4”). Group 2: Day 7-44 mg of a single pDNA containing two copies of rituximab cDNAs (“aCD20-aCD20”) and 44 mg of the anti-Sars-Cov-2 monoclonal antibody B38 Kappa cDNA (“B38-Kappa”) cDNAs (“B38-Tag”), Day 14-88 mg of the anti-Sars-Cov-2 monoclonal antibody H4 cDNA (“H4”). Group 3: Day 7-44 mg of rituximab cDNA (“aCD20-dual”) and 44 mg of the B38 anti-SARS CoV2 cDNAs (“B38-Tag”), Day 14—No Treatment.

[0174] Serum levels of mAb proteins were measured by ELISA on days 1, 8, and 15. The indicated time points are all relative to the initial injection of pDNAs containing 5J8 and aIL5 cDNAs. Results are shown in FIG. 4, which show that serial injection of different DNA mAb vectors on a weekly basis can produce significant ongoing serum levels of four different intact monoclonal antibodies in individual mice.

### Example 5

### Multiple Protein Expression

[0175] This Example describes in vivo expression of multiple unique monoclonal antibodies following serial treatments in Mice over a 3 week Treatment.

[0176] Experimental methods:

[0177] With regard to FIG. 5A: On day 0, eight groups of mice, each containing three mice per group, were given IP injections of dexamethasone (40 mg/kg) two hours prior to sequential IV injection of lipids (1000 nmol DOTAP SUV with 2.5 mol % dexamethasone palmitate and 1000 nmol DMPC (1,2-Dimyristoyl-SN-glycero-3-phosphocholine neutral lipid) with 5 mol % dexamethasone palmitate, followed by the following pDNA(s) containing the following cDNAs at indicated doses: Group 1: 88 mg of a single pDNA encoding rituximab, anti-IL5 and 5J8 cDNAs (“maCD20-haIL5-m5J8”); Group 2: 88 mg of a single pDNA encoding the anti-SARS-Cov-2 monoclonal antibody B38 Lambda cDNA (“B38-Kappa”), rituximab, anti-IL5 and 5J8 cDNAs (“mB38Ld-maCD20-haIL5-m5J8”); Group 3: 88 mg of a single pDNA encoding the anti-Sars-Cov-2 monoclonal antibody H4 cDNA (“mH4”), rituximab, anti-IL5 and 5J8 cDNAs (“mH4-maCD20-haIL5-m5J8”); Group 4: 88 mg of a single pDNA encoding the anti-Sars-Cov-2 monoclonal antibody B38 Kappa cDNA (“B38-Kappa”) and anti-IL5 cDNAs (“mB38Kp-haIL5”); Group 5: 88 mg of a single pDNA encoding the anti-Sars-Cov-2 monoclonal antibody B38 Kappa cDNA (“B38-Kappa”) and 5J8 cDNAs (“mB38Kp-m5J8”); Group 6: 88 mg of a single pDNA encoding the anti-Sars-Cov-2 monoclonal antibody B38 Lambda cDNA (“B38-Lambda”) and anti-IL5 cDNAs (“mB38Ld-maIL5”); Group 7: 88 mg of a single pDNA encoding the anti-Sars-Cov-2 monoclonal antibody B38 Lambda cDNA and 5J8 cDNAs (“mB38Ld-m5J8”); Group 8: 88 mg of a single pDNA encoding anti-IL5 and B38 Lambda cDNAs (“maIL5-mB38Ld”). Some of these same groups of mice were re-treated on days 7 and/or day 14, with IP dexamethasone and IV lipid and sequential pDNA as before, however with pDNA(s) containing the following cDNAs at indicated doses:

[0178] Group 1: Day 7-44 mg rituximab (“aCD20-dual”) and 44 mg of a single pDNA containing anti-SARS-CoV2 mAb H4, Day 14—No Treatment. Group 2: Day 7—No Treatment, Day 14—No Treatment. Groups 3, 4: Day 7-44 mg rituximab (“aCD20-dual”) and 44 mg of a single pDNA containing two copies of 5J8 cDNAs (“5J8-5J8”), Day 14-44 mg human G-CSF (“GCSF”) and 44 mg human alpha-glactosidase A (“GLA”) (“hGLA-hyFc”), Day 21-44 mg human Ace2 (“hACE2”) and 44 mg human growth hormone (“hGH”) (“hGH-Fc”). Groups 5: Day 7-44 mg rituximab (“aCD20-dual”) and 44 mg of a single pDNA containing two copies of anti-IL5 cDNAs (“aIL5-aIL5”), Day 14-44 mg GCSF (“GCSF”) and 44 mg GLA (“GLA”). Groups 6 and 8: Day 7-44 mg rituximab (“aCD20-dual”) and 44 mg of a single pDNA containing two copies of 5J8 cDNAs (“5J8-5J8”), Day 14—No Treatment. Group 7: Day 7-44 mg rituximab (“aCD20-dual”) and 44 mg of a single pDNA containing two copies of anti-IL5 cDNAs (“aIL5-aIL5”), Day 14—No Treatment. Serum levels of anti-CoV2 mAb proteins were measured by ELISA 24 hours after the initial treatment and weekly thereafter. The indicated time points are all relative to the initial injection of pDNAs. Group mean+/−SEM expression levels are indicated on the graph.

[0179] With regard to FIG. 5B: Serum from treated mice in treatment group 4 (above) were measured by ELISA for expression of non-monoclonal antibody therapeutic human proteins G-CSF, GLA, GH, and ACE2 in serum at day 15 and day 22 following treatment with GCSF+GLA and ACE2+GH containing pDNAs as indicated.

[0180] These results, shown in FIGS. 5A and 5B, demonstrate that serial injection of different DNA mAb vectors on a weekly basis can produce significant ongoing serum levels of a total of four different intact monoclonal antibodies and four other non-monoclonal antibody therapeutic proteins (total of eight therapeutic proteins) in individual mice.

### Example 6

### Multiple-MAb Expression

[0181] This Example describes the production of three different monoclonal antibody proteins following a single treatment in Mice.

[0182] Experimental methods: On day 0, eight groups of mice, each containing three mice per group, were given IP injections of dexamethasone (40 mg/kg) two hours prior to sequential IV injection of lipids (1000 nmol DOTAP SUV with 2.5 mol % dexamethasone palmitate and 1000 nmol DMPC (1,2-Dimyristoyl-SN-glycero-3-phosphocholine neutral lipid with 5 mol % dexamethasone palmitate), followed by the following pDNA(s) containing the following cDNAs at indicated doses: Group 1: 88 mg of a single pDNA encoding anti-SARS-CoV2 B38 kappa and anti-IL5 (“mB38-haIL5”); Group 2: 88 mg of a single pDNA encoding anti-SARS-CoV2 B38 kappa and anti-IL5 (“mB38-maIL5”); Group 3: 88 mg of a single pDNA encoding anti-SARS-CoV2 B38 lambda and anti-influenza A 5J8 (“mB38-h5J8”); Group 4: 88 mg of a single pDNA encoding anti-SARS-CoV2 B38 lambda and anti-influenza A 5J8 (“mB38-m5J8”); Group 5: 44 mg of a single pDNA encoding two copies of anti-IL5 (“aIL5-aIL5”) and 44 mg of a single pDNA encoding anti-SARS-CoV2 (“H4”); Group 6: 44 mg of a single pDNA encoding three copies of anti-IL5 (“aIL5-aIL5-aIL5”) and 44 mg of a single pDNA encoding anti-SARS-CoV2 (“H4”); Group 7: 88 mg of a single pDNA encoding anti-influenza A 5J8 and anti-IL5 (“5J8-aILH-aILL”); Group 8: 88 mg of a single pDNA encoding anti-influenza A 5J8 and anti-IL5 (“5J8-aIL5”). Serum levels of expressed mAb proteins were measured by ELISA 1, 14 and 22 days after the initial treatment. Group mean+/−SEM expression levels are indicated in FIG. 6.

[0183] These results, shown in FIG. 6, demonstrate that one dose (e.g., using cationic and neutral lipids) of DNA-encoded mAb vectors, in the form of a single pDNA or composed of multiple pDNAs, can produce sustained expression of a two separate mAbs in mice, and that the structure and composition of the pDNA or pDNAs contribute to mAb expression levels.

### Example 7

### Anti-Sars-CoV2 Protein Expression

[0184] This Example describes production of multiple different anti-SARS CoV2 therapeutic proteins separately and in combination following a single treatment in mice.

[0185] Experimental methods: On day 0, eight groups of mice, each containing three mice per group, were given IP injections of dexamethasone (40 mg/kg) two hours prior to sequential IV injection of lipids (1000 nmol DOTAP SUV with 2.5 mol % dexamethasone palmitate and 1000 nmol DMPC (1,2-Dimyristoyl-SN-glycero-3-phosphocholine neutral lipid with 5 mol % dexamethasone palmitate), followed by injection of 88 mg of a single pDNA encoding the following cDNAs: Group 1: soluble human ACE2 (“hACE2-BV3”), Group 2: two copies of soluble human ACE2 (“hACE2-hACE2”), Group 3: anti-SARS-CoV2 mAb B38 Kappa (“B38Kp”), Group 4: two copies of anti-SARS-CoV2 mAb H4 (“H4-H4”), Group 5: anti-SARS-CoV2 mAb B38 Kappa and soluble human ACE2 (“B38Kp-hACE2”), Group 6: soluble human ACE2 and anti-SARS-CoV2 mAb B38 Kappa (“hACE2-B38Kp”), Group 7: anti-SARS-CoV2 mAb H4 and soluble human ACE2 (“H4-hACE2”), Group 8: soluble human ACE2 and anti-SARS-CoV2 mAb H4 (“hACE2-H4”). Serum expression levels of anti-SARS-CoV2 mAbs were measured by an anti-RBD ELISA using recombinant purified H4 or B38 kappa as standards, or by a non-antigen-specific human IgG or human kappa light chain ELISA. Serum expression levels of soluble human ACE2 were determined by commercial ELISA. Group mean+/−SEM expression levels are indicated in FIG. 7.

[0186] The results, in FIG. 7, demonstrate anti-SARS-CoV2 therapeutics (either soluble human ACE2 protein and/or anti-SARS-CoV-2 mAbs reactive to SARS-CoV2 spike protein alone, or in combination) can be produced in animals following a single treatment with a single pDNA vector.

### Example 8

### Anti-Sars-CoV2 Protein Expression

[0187] This Example describes production of Multiple anti-SARS CoV2 therapeutics separately and in combination following liposome and dexamethasone treatment in mice.

[0188] Experimental methods: On day 0, four groups of mice, each containing three mice per group, were given IP injections of dexamethasone (40 mg/kg) two hours prior to sequential IV injection of lipids (1000 nmol DOTAP SUV with 2.5 mol % dexamethasone palmitate and 1000 nmol DMPC (1,2-Dimyristoyl-SN-glycero-3-phosphocholine neutral lipid with 5 mol % dexamethasone palmitate), followed by injection of 88 mg of a single pDNA encoding the following cDNAs: Group 1: soluble human ACE2-Fc fusion (“shACE2-Fc”), Group 2: soluble human ACE2-Fc fusion LALA variant (“shACE2-Fc-LALA”) Group 3: anti-SARS-CoV2 mAb 4A8 and soluble human ACE2-Fc fusion (“4A8-shACE2-Fc”), Group 4: two copies of soluble human ACE2-Fc fusion (“shACE2-shACE2”).

[0189] In FIG. 8A, serum expression levels of soluble human ACE2-containing proteins were determined by a SARS-CoV2 RBD-based ELISA on days 1 and 9 following treatment. Group mean+/−SEM expression levels are indicated on the graph.

[0190] In FIG. 8B, serum expression levels of soluble human ACE2-Fc fusions were determined in groups 1 thru 3 by an Fc-specific ELISA on days 1 and 9 following treatment. Group mean+/−SEM expression levels are indicated on the graph.

[0191] The results, shown in FIGS. 8A and 8B, demonstrate anti-SARS-CoV2 therapeutics (either soluble human ACE2 fusion protein alone, or in combination with the 4A8 mAb reactive against SARS-CoV2 spike protein, may be expressed in vivo following liposome and dexamethasone treatment with a pDNA vector.

### Example 9

### ACE2 Protein Expression

[0192] This Example describes production of Human ACE2 and modified variants in mice.

[0193] Experimental methods: On day 0, twelve groups of mice, each containing three mice per group, were given IP injections of dexamethasone (40 mg/kg) two hours prior to sequential IV injection of lipids (1000 nmol DOTAP SUV with 2.5 mol % dexamethasone palmitate and 1000 nmol DMPC (1,2-Dimyristoyl-SN-glycero-3-phosphocholine neutral lipid with 5 mol % dexamethasone palmitate), followed by injection of 88 mg of a single pDNA encoding human ACE2 cDNA (Group 1) or a modified version of ACE2, groups 2 thru 12, as indicated. One day later, serum expression of ACE2 was determined by ELISA using recombinant RBD protein for capture, and either an anti-Fc reagent or anti-ACE2 reagent for detection. Group mean+/−SEM expression levels are indicated in FIG. 9, which shows the results.

### Example 10

### Expression of Human Growth Hormone Fused to Half-Life Extending Peptide

[0194] This Example describes the in vivo expression of human growth hormone (hGH) fused to a half-life extending peptide.

[0195] Methods: Groups of 4 (red) or 3 (other groups) CD-1 mice each were injected with 40 mg/kg water-soluble dexamethasone IP. Two hours later, mice were injected IV, first with liposomes followed approximately 2 minutes later with 75 ug plasmid DNA encoding human GH (hGH). All liposome mixtures contained 1000 nmol DOTAP SUV with 2.5% Dexamethasone 21-Palmitate as well as 1000 nmol DMPC with 5% Dexamethasone 21-palmitate. Mice were bled 24 hours after injection, then weekly or every few weeks thereafter to obtain serum. Serum levels of hGH were assessed by ELISA. At day 127 after injection, serum levels of mouse IGF-1, as well as of hGH were coordinately assessed by their respective ELISAs.

[0196] The results are shown in FIGS. 45A-45C. FIG. 45A shows this procedure drives expression of the wild type hGH cDNA fused to a protein half-life extending DNA sequence, including Fc, serum albumin or Xten, and can significantly increase serum hGH levels over time in immunocompetent mice when compared to hGH serum levels produced by a hGH DNA vector that lack protein half-life extending DNA sequences. FIG. 45B shows that the cDNA-encoded hGH protein produced is fully bioactive, as it appropriately increases the levels of the hGH-regulated, endogenous mouse, IGF-1 protein. FIG. 45C shows one injection of a DNA vector in this procedure drives the wild type hGH cDNA but lacking any protein half-life extending DNA sequence can produce durable production of therapeutic hGH serum levels in immunocompetent mice. This is despite the fact that the serum half-life of the hGH protein is less than 20 minutes.

### Example 11

### Expression of Human Growth Hormone Fused to Half-Life Extending Peptide

[0197] This Example describes the in vivo expression of human growth hormone (hGH) fused to a half-life extending peptide.

[0198] Methods: Groups of 4 CD-1 mice each were injected with 40 mg/kg water-soluble dexamethasone IP. Two hours later, mice were injected IV, first with liposomes followed approximately 2 minutes later with 75 ug plasmid DNA encoding human GH. All liposome mixtures contained 1000 nmol DOTAP SUV with 2.5% Dexamethasone 21-Palmitate as well as 1000 nmol DMPC with 5% Dexamethasone 21-palmitate. Mice were bled 24 hours after injection and every 7-21 days thereafter to isolate serum, and serum expression assessed by ELISA. The results are shown in FIG. 46, which demonstrate that this procedure with vectors driving the wild type hGH cDNA fused to a protein half-life extending DNA sequence, including Fc, serum albumin or Xten, can significantly increase serum hGH levels over time in immunocompetent mice when compared to hGH serum levels produced by a hGH DNA vector that lack protein half-life extending DNA sequences.

### Example 12

### Expression of Human Growth Hormone with Reinjection of Plasmid

[0199] This Example describes the in vivo expression of human growth hormone (hGH) with reinjection of the plasmid.

[0200] Methods: Groups of 4 CD-1 mice each were injected with 40 mg/kg water-soluble dexamethasone IP. Two hours later, mice were injected IV, first with liposomes followed approximately 2 minutes later with 75 ug plasmid DNA encoding human GH. All liposome mixtures contained 1000 nmol DOTAP SUV with 2.5% Dexamethasone 21-Palmitate as well as 1000 nmol DMPC with 5% Dexamethasone 21-palmitate. Mice were bled weekly to assess expression. Expression for 43 days after initial injection are shown for pre-reinjection. On day 49, mice were given the same treatment as the initial injection. Mice were bled 24 hours after re-injection to isolate serum and every 7-21 days thereafter, and serum expression assessed by ELISA.

[0201] These results are shown in FIG. 47 and demonstrate that, using this procedure, one re-injection of a DNA vector driving the wild type hGH cDNA into fully immunocompetent mice can significantly and durably further increase serum hGH levels produced by the initial hGH DNA vector injection.

### Example 13

### Expression of Human Growth Hormone Fused to Half-Life Extending Peptide

[0202] This Example describes the in vivo expression of human growth hormone (hGH) fused to a half-life extending peptide.

[0203] Methods: Groups of 5 CD-1 mice were used. Mice were injected with 40 mg/kg water-soluble dexamethasone IP. Two hours later, mice were injected IV, first with liposomes followed approximately 2 minutes later with 75 ug plasmid DNA encoding human GH. All liposome mixtures contained 1000 nmol DOTAP SUV with 2.5% Dexamethasone 21-Palmitate as well as 1000 nmol DMPC with 5% Dexamethasone 21-palmitate. Mice were bled 24 hours after injection and every 7-28 days thereafter to isolate serum, and serum expression assessed by ELISA. The results are shown in FIG. 48. These results demonstrate that this procedure with DNA vectors driving the wild type hGH cDNA fused to an Fc protein half-life extending DNA sequence can produce serum hGH levels within the 1 to 10 ng/ml hGH therapeutic range for at least the next 225 days (>30% of a normal mouse's lifetime) after a single injection into immunocompetent mice.

### Example 14

### Expression of Human Growth Hormone Fused to Half-Life Extending Peptide

[0204] This Example describes the in vivo expression of human growth hormone (hGH) fused to a half-life extending peptide.

[0205] Methods: Groups of 3 CD-1 mice each were injected with 40 mg/kg water-soluble dexamethasone IP. Two hours later, mice were injected IV, first with liposomes followed approximately 2 minutes later with 75 ug plasmid DNA encoding human GH. All liposome mixtures contained 1000 nmol DOTAP SUV with 2.5% Dexamethasone 21-Palmitate as well as 1000 nmol DMPC with 5% Dexamethasone 21-palmitate. Mice were bled 24 hours after injection and every 7-21 days thereafter to isolate serum, and serum expression assessed by ELISA.

[0206] The results are shown in FIG. 49. These results demonstrate this procedure with DNA vectors driving the wild type hGH cDNA fused to an Fc protein half-life extending DNA sequence produce fully bioactive hGH protein in mice, as the cDNA-encoded hGH protein appropriately increases the levels of the hGH-regulated, endogenous mouse, IGF-1 protein.

### Example 15

### Expression of Human Growth Hormone Fused to Half-Life Extending Peptide

[0207] This Example describes the in vivo expression of human growth hormone (hGH) fused to a half-life extending peptide.

[0208] Methods: Groups of 3 CD-1 mice each were injected with 40 mg/kg water-soluble dexamethasone IP. Two hours later, mice were injected IV, first with liposomes followed approximately 2 minutes later with 75 ug plasmid DNA encoding human GH. All liposome mixtures contained 1000 nmol DOTAP SUV with 2.5% Dexamethasone 21-Palmitate as well as 1000 nmol DMPC with 5% Dexamethasone 21-palmitate. Mice were bled day 1 and day 15 after injection to isolate serum, and serum expression assessed by ELISA.

[0209] FIGS. 50A-50B show the results. FIG. 50A shows that selective site-directed mutagenesis of the Fc region of an DNA vector driving the wild type hGH cDNA fused to an Fc protein half-life extending DNA sequence including CTP can selectively either increase or decrease serum hGH levels produced in immunocompetent mice. FIG. 50B shows that selective site-directed mutagenesis of the Fc region of a DNA vector driving the wild type hGH cDNA fused to an Fc protein half-life extending DNA sequence can selectively increase serum hGH levels produced over time in immunocompetent mice.

### Example 16

### Immuno-modulation Agents

[0210] This Example describes the testing of various immuno-modulating agents.

### Part 1

[0211] Methods: Groups of 3 CD-1 mice each were injected with 900 nmol DOTAP SUV, with or without Dexamethasone 21-palmitate or Cholesteryl palmitate in molar percentages as shown in FIG. 51. Two minutes after liposome injection, mice were injected with 70 ug plasmid DNA encoding hG-CSF. Mice were bled the following day and serum levels of hG-CSF protein was assessed by ELISA. ALT levels were assessed in sera. Results are shown in FIG. 51, which shows that incorporating an optimized molar percentage of dexamethasone palmitate (DexPalm) into cationic liposomes can both further increase gene expression and further decrease toxicity.

### Part 2

[0212] Methods: Groups of 3 CD-1 mice each were used. One group (+Dex) was injected IP with 40 mg/kg Dexamethasone, one group (+DexP IP) was injected IP with 900 nmol DOTAP liposomes containing 2.5 molar % Dexamethasone 21-palmitate, and one group (Protamine) was injected IP with 5 mg/kg Protamine sulfate. Two hours later, mice were first injected with 900 nmol DOTAP SUV, with or without Dexamethasone 21-palmitate or Cholesteryl palmitate in molar percentages as shown in FIG. 52. Two minutes after liposome injection, mice were injected with 70 ug plasmid DNA encoding hG-CSF. Mice were bled the following day and serum levels of hG-CSF protein was assessed by ELISA. ALT levels were assessed in sera. The results are shown in FIG. 52, which show that incorporating an optimized molar percentage of dexamethasone palmitate into cationic liposomes can both further increase gene expression and further decrease toxicity.

### Part 3

[0213] Methods: Groups of 3 CD-1 mice each were used. One group each was injected IP with 900 nmol DOTAP liposomes containing 2.5% Dexamethasone 21-palmitate, 5 minutes before, 5 minutes after, or 30 minutes before IV injections. One group was and one group (Protamine) was injected IP with 5 mg/kg Protamine sulfate 5 minutes before IV injections. For IV injections, mice were first injected with 900 nmol DOTAP SUV with 2.5% Dexamethasone 21-palmitate in the liposomes. Two minutes after liposome injection, mice were injected with 70 ug plasmid DNA encoding hG-CSF. Mice were bled the following day and serum levels of hG-CSF protein was assessed by ELISA. ALT levels were assessed in sera. FIG. 53 shows the results, which show that pre-injecting an optimized molar percentage of dexamethasone palmitate in liposomes prior to injecting cationic liposomes can both further increase gene expression and further decrease toxicity.

### Part 4

[0214] Methods: Groups of 3 CD-1 mice each were injected with 900 nmol DOTAP SUV, with or without one of a number of different endogenous, anti-inflammatory lipids (AILs) in molar percentages in the liposomes as shown in FIG. 54. Two minutes after liposome injection, mice were injected with 70 ug plasmid DNA encoding hG-CSF. Mice were bled the following day and serum levels of hG-CSF protein was assessed by ELISA. ALT levels were assessed in sera. The results are shown in FIG. 54, which shows that injecting some AILs incorporated into cationic liposomes can both further increase gene expression and further decrease toxicity (ALT levels). In contrast, injecting selected molar percentages of other AILs incorporated into cationic liposomes can significantly increase ALT.

### Part 5

[0215] Methods: Groups of 3 CD-1 mice each were injected with 900 nmol DOTAP SUV, with or without one of a number of different endogenous, anti-inflammatory lipids (AILs) in molar percentages as shown in FIG. 55. Two minutes after liposome injection, mice were injected with 70 ug plasmid DNA encoding hG-CSF. Mice were bled the following day and serum levels of hG-CSF protein was assessed by ELISA. ALT levels were assessed in sera. The results, shown in FIG. 55, show that injecting certain ATLs incorporated into cationic liposomes can both further increase gene expression and further decrease toxicity (ALT levels). In contrast, injecting selected molar percentages of other AILs incorporated into cationic liposomes can significantly increase ALT.

### Part 6

[0216] Methods: Groups of 3 CD-1 mice each were used. One group (+Dex) was injected IP with 40 mg/kg Dexamethasone, one group. Two hours later, mice were first injected with 900 nmol DOTAP SUV, with or without 5 mole percent Dexamethasone 21-palmitate. Two minutes after liposome injection, mice were injected with either 40 or 130 ug plasmid DNA encoding hG-CSF. Mice were bled the following day and serum levels of hG-CSF protein was assessed by ELISA. ALT levels were assessed in sera. The results are shown in FIG. 56, and show that incorporating an optimized molar percentage of dexamethasone palmitate into cationic liposomes can further increase peak levels of gene expression following an otherwise ineffective hG-CSF-DNA dose.

### Example 17

### Intranasal Administration and Immunomodulation

[0217] This Example describes targeting hematopoietic cells in mouse lungs following Intranasal administration of liposomes.

[0218] Experimental Methods: Mice were anesthetized and administered via intranasal route 200 nmol of the indicated liposome formulations each containing 1 mol % fluorescent phosphatidyl-ethanolamine to track uptake of liposomes or lactated ringers control. One day later, lungs were harvested, digested to single cell suspensions and surface stained with fluorescent antibodies to detect mouse CD45, CD11b and F4/80 markers prior to analysis by flow cytometry. DOPS=1,2-dioleoyl-sn-glycero-3-phospho-L-serine, mixPS=1-stearoyl-2-oleoyl-sn-glycero-3-phospho-L-serine. The results are shown in FIG. 57, which shows that by selectively modifying the lipid composition of liposomes administered intranasally, that these liposomes can be selectively targeted to intrapulmonary monocytes and macrophages to different extents, thus selectively immune-modulating the lung.

### Example 18

### Differential T Cell Activation

[0219] This Example describes differential T cell activation resulting from administration of particular liposome formulations.

[0220] Experimental Methods: On day 0, six groups of mice, each containing three mice per group, were given the following treatments: Group 1—IP injection of dexamethasone (40 mg/kg) two hours prior to sequential IV injection of lipids (1000 nmol DOTAP SUV with 2.5 mol % dexamethasone palmitate and 1000 nmol DMPC (1,2-Dimyristoyl-SN-glycero-3-phosphocholine neutral lipid) with 5 mol % dexamethasone palmitate), followed by a single pDNA encoding anti-SARS CoV2 H4 kappa mAb, anti-CD20, anti-influenza A 5J8, and anti-human IL-5.

[0221] Group 2—Sequential IV injection of lipids (1000 nmol DOTAP SUV with 2.5 mol % dexamethasone palmitate and 1000 nmol DMPC (1,2-Dimyristoyl-SN-glycero-3-phosphocholine neutral lipid) with 5 mol % dexamethasone palmitate), followed by a single pDNA encoding anti-SARS CoV2 H4 kappa mAb, anti-CD20, anti-influenza A 5J8, and anti-human IL-5.

[0222] Group 3—Sequential IV injection of lipids (1000 nmol DOTAP SUV and 1000 nmol DMPC (1,2-Dimyristoyl-SN-glycero-3-phosphocholine neutral lipid) with 5 mol % dexamethasone palmitate), followed by a single pDNA encoding anti-SARS CoV2 H4 kappa mAb, anti-CD20, anti-influenza A 5J8, and anti-human IL-5.

[0223] Group 4—Sequential IV injection of lipids (1000 nmol DOTAP SUV with 2.5 mol % dexamethasone palmitate and 1000 nmol DMPC (1,2-Dimyristoyl-SN-glycero-3-phosphocholine neutral lipid), followed by a single pDNA encoding anti-SARS CoV2 H4 kappa mAb, anti-CD20, anti-influenza A 5J8, and anti-human IL-5.

[0224] Group 5—Sequential IV injection of lipids (1000 nmol DOTAP SUV with 2.5 mol % dexamethasone palmitate and 1000 nmol DMPC (1,2-Dimyristoyl-SN-glycero-3-phosphocholine neutral lipid) with 5 mol % dexamethasone palmitate), followed by a single pDNA encoding anti-SARS CoV2 H4 kappa mAb, anti-CD20, anti-influenza A 5J8, and anti-human IL-5.

[0225] Group 6—No Treatment

[0226] FIG. 58 shows the results and shows that by selectively modifying a parenteral aqueous soluble predose, and/or the molar percentage of dexamethasone palmitate incorporated into subsequently administered liposomes, that the level of T lymphocyte activation both in lung and in the blood can be selectively immuno-modulated.

### Example 19

### Differential T Cell Activation

[0227] This Example describes differential T cell activation resulting from administration of liposome formulations.

[0228] Experimental Methods: On day 0, eight groups of mice, each containing three mice per group, were treated as follows:

[0229] Group 1—Untreated

[0230] Group 2—IP injection of dexamethasone (40 mg/kg) two hours prior to sequential IV injection of lipids (1000 nmol DOTAP SUV with 2.5 mol % dexamethasone palmitate and 1000 nmol DMPC (1,2-Dimyristoyl-SN-glycero-3-phosphocholine neutral lipid) with 5 mol % dexamethasone palmitate), followed by a single pDNA encoding human PECAM-1.

[0231] Group 3—IP injections of dexamethasone (40 mg/kg) two hours prior to sequential IV injection of lipids (1000 nmol DOTAP:cholesterol (85:15) SUV with 2.5 mol % dexamethasone palmitate and 1000 nmol DMPC (1,2-Dimyristoyl-SN-glycero-3-phosphocholine neutral lipid) with 5 mol % dexamethasone palmitate), followed by a single pDNA encoding human PECAM-1.

[0232] Group 4—IP injections of dexamethasone (40 mg/kg) two hours prior to sequential IV injection of lipids (1000 nmol DOTAP:DODAP (1:1) SUV with 2.5 mol % dexamethasone palmitate and 1000 nmol DMPC (1,2-Dimyristoyl-SN-glycero-3-phosphocholine neutral lipid) with 5 mol % dexamethasone palmitate), followed by a single pDNA encoding human PECAM-1.

[0233] Group 5—IP injections of dexamethasone (40 mg/kg) two hours prior to sequential IV injection of lipids (1000 nmol DOTAP SUV with 2.5 mol % dexamethasone palmitate and 1000 nmol DMPC (1,2-Dimyristoyl-SN-glycero-3-phosphocholine neutral lipid):cholesterol (1:1) with 5 mol % dexamethasone palmitate), followed by a single pDNA encoding human PECAM-1.

[0234] Group 6—Two IP injections of dexamethasone (40 mg/kg) two hours prior and just prior to sequential IV injection of lipids (1000 nmol DOTAP SUV with 2.5 mol % dexamethasone palmitate and 1000 nmol DMPC (1,2-Dimyristoyl-SN-glycero-3-phosphocholine neutral lipid):cholesterol (1:1) with 5 mol % dexamethasone palmitate), followed by a single pDNA encoding human PECAM-1.

[0235] Group 7—Two IP injections of 2.5 mol % dexamethasone palmitate in phosphatidylserine:cholesterol 2:1 MLV 24 hours and two hours prior to sequential IV injection of lipids (1000 nmol DOTAP SUV with 2.5 mol % dexamethasone palmitate and 1000 nmol DMPC (1,2-Dimyristoyl-SN-glycero-3-phosphocholine neutral lipid) with 5 mol % dexamethasone palmitate), followed by a single pDNA encoding human PECAM-1.

[0236] Group 8—Two IP injections of 2.5 mol % dexamethasone palmitate in DOTAP:cholesterol 2:1 MLV 24 hours and two hours prior to sequential IV injection of lipids (1000 nmol DOTAP SUV with 2.5 mol % dexamethasone palmitate and 1000 nmol DMPC (1,2-Dimyristoyl-SN-glycero-3-phosphocholine neutral lipid) with 5 mol % dexamethasone palmitate), followed by a single pDNA encoding human PECAM-1.

[0237] One day later, lungs and peripheral blood were harvested, digested to single cell suspensions if necessary, and surface stained with fluorescent antibodies to detect mouse CD4, CD8 alpha, CD44, CD69, and human PECAM-1 markers prior to analysis by flow cytometry.

[0238] FIG. 59 shows the results, which show that by selectively modifying a parenteral aqueous soluble pre-dose, and/or the molar percentage of dexamethasone palmitate incorporated into subsequently administered liposomes, that the level of T lymphocyte activation both in lung and in the blood can be selectively immuno-modulated.

### Example 20

### Anti-TNFa and Heparinoid Agents

[0239] This Example describes the use of anti-TNFa monoclonal antibodies and Heparinoid Agents for increasing expressing in in vivo expression methods.

### Part 1—Anti-TNFa Monoclonal Antibody

[0240] Methods: Groups of 3 mice were used. One group was given 100 ug each anti-TNFa monoclonal antibody per mouse IP, 2 hours prior to IV injections. Mice were then injected IV with 900 nmol DOTAP SUV, followed 2 minutes later by either 70 ug or 130 ug plasmid DNA encoding hG-CSF. Mice were bled 24 hours after injection, and hG-CSF expression in the sera assessed by ELISA. Serum ALT/AST levels were measured.

[0241] Results are shown in FIG. 60, which shows that pre-administration of an anti-inflammatory agent, here anti-TNF monoclonal antibody, can both further increase gene expression while further reducing its toxicity.

### Part 2—Nsh

[0242] Methods: Groups of 3 mice were used. Except for the control group, mice were given NSH (N-Acetyl-De-O-Sulfated Heparin) IP at 0.25 or 1 mg per mouse either 2 hours pre or 2 hours post lipid and DNA injection. Mice were then injected IV with 900 nmol DOTAP SUV, followed 2 minutes later by 70 ug plasmid DNA encoding hG-CSF. Mice were bled 24 hours after injection, and hG-CSF expression in the sera assessed by ELISA. Serum ALT/AST levels were measured. Results are shown in FIG. 61, which shows that either pre- or post-administration of a NSH can reduce toxicity.

### Part 3—Nsh

[0243] Methods: Groups of 3 mice were used. Heparinoid-treated mice were given NSH (N-Acetyl-De-O-Sulfated Heparin) IP at 0.25 or 1 mg per mouse either 2 hours pre or 2 hours post lipid and DNA injection. Mice were then injected IV with 900 nmol DOTAP SUV, followed 2 minutes later by 70 ug plasmid DNA encoding hG-CSF. Mice were bled 24 hours after injection, and hG-CSF expression in the sera assessed by ELISA. Tocopherol-treated mice were given 900 nmol DOTAP SUV containing alpha-tocopherol, followed by 70 ug plasmid DNA encoding hG-CSF. Serum ALT/AST levels were measured.

[0244] The results are shown in FIG. 62, which show that either pre- or post-administration of a NSH can reduce toxicity.

### Part 4—Nsh

[0245] Methods: Groups of 3 mice were used. Heparinoid-treated mice were given NSH (N-Acetyl-De-O-Sulfated Heparin) IP 2 hours prior to lipid and DNA injection. Mice were then injected IV with 900 nmol DOTAP SUV, followed 2 minutes later by 70 ug plasmid DNA encoding hG-CSF. Mice were bled 24 hours after injection, and hG-CSF expression in the sera assessed by ELISA. Tocopherol mice were given 900 nmol DOTAP SUV containing alpha-tocopherol, followed by 70 ug plasmid DNA encoding hG-CSF. Serum ALT/AST levels were measured.

[0246] FIG. 63 shows the results which show that either pre-administration of NSH can both further increase gene expression while further reducing its toxicity.

### Example 21

### Immunomodulation Following Liposome Administration

[0247] This example describes immunomodulation of the lymphocyte and monocyte cell populations in mice following administration of various liposome formulations containing dexamethasone and/or dexamethasone palmitate.

[0248] Experimental Methods: Groups of 2-3 CD-1 mice were used. On day 0, eight groups of mice, were given the following treatments:

Group 1—IP injection of water-soluble dexamethasone (40 mg/kg) only.
Group 2—IP injection of dexamethasone (40 mg/kg) two hours prior to IV injection of lipids (1000 nmol DOTAP SUV with 2.5 mol % dexamethasone palmitate and 1000 nmol DMPC (1,2-Dimyristoyl-SN-glycero-3-phosphocholine neutral lipid) with 5 mol % dexamethasone palmitate).
Group 3—IV injection of lipids (1000 nmol DOTAP SUV with 2.5 mol % dexamethasone palmitate and 1000 nmol DMPC (1,2-Dimyristoyl-SN-glycero-3-phosphocholine neutral lipid) with 5 mol % dexamethasone palmitate).
Group 4—IP injection of 1000 nmol DMPC (1,2-Dimyristoyl-SN-glycero-3-phosphocholine neutral lipid) with 5 mol % dexamethasone palmitate) MLV two hours prior to IV injection of lipids (1000 nmol DOTAP SUV with 2.5 mol % dexamethasone palmitate and 1000 nmol DMPC (1,2-Dimyristoyl-SN-glycero-3-phosphocholine neutral lipid) MLV with 5 mol % dexamethasone palmitate.
Group 5—IP injection of 1000 nmol DMPC (1,2-Dimyristoyl-SN-glycero-3-phosphocholine neutral lipid) with 5 mol % dexamethasone palmitate) SUV two hours prior to IV injection of lipids (1000 nmol DOTAP SUV with 2.5 mol % dexamethasone palmitate and 1000 nmol DMPC (1,2-Dimyristoyl-SN-glycero-3-phosphocholine neutral lipid) MLV with 5 mol % dexamethasone palmitate.
Group 6—IP injection of 1000 nmol DMPC (1,2-Dimyristoyl-SN-glycero-3-phosphocholine neutral lipid) with 5 mol % dexamethasone palmitate) MLV two hours prior to IV injection of lipids (1000 nmol DOTAP SUV with 2.5 mol % dexamethasone palmitate and 1000 nmol DMPC (1,2-Dimyristoyl-SN-glycero-3-phosphocholine neutral lipid) MLV with 5 mol % dexamethasone palmitate containing MTAS-NLS-SPD peptide.
Group 7—IP injection of 1000 nmol DMPC (1,2-Dimyristoyl-SN-glycero-3-phosphocholine neutral lipid) with 5 mol % dexamethasone palmitate) SUV two hours prior to IV injection of lipids (1000 nmol DOTAP SUV with 2.5 mol % dexamethasone palmitate and 1000 nmol DMPC (1,2-Dimyristoyl-SN-glycero-3-phosphocholine neutral lipid) MLV with 5 mol % dexamethasone palmitate containing MTAS-NLS-SPD peptide.
Group 8—No treatment.

[0249] Twenty four hours following liposome treatment, peripheral blood was harvested in EDTA containing microtainer tubes and analyzed by CBC apparatus. Group mean values+/−SEM are displayed. FIG. 64 shows that administration of various formulations of liposomes containing dexamethasone palmitate decreases lymphocyte counts in blood compared to systemic administration of dexamethasone alone. FIG. 65 shows that administration of various formulations of liposomes containing dexamethasone palmitate decreases monocyte counts in blood compared to systemic administration of dexamethasone alone.

### Example 22

### Production of Ongoing Fully SARS-CoV-2 Neutralizing Levels of a Single Anti-SARS-CoV2 mAb Following a Single HEDGES DNA Vector Administration

[0250] This example describes expression of single SARS-CoV-2 antibodies in mice produces fully neutralizing levels of mAb using the following injection protocol. The five different SARS-CoV-2 antibodies individually expressed in mice were: C135, C215, COV2-2355, CV07-209, and C121 (see Table 7 for sequence information). At day 0, groups of mice were pretreated with 40 mg/kg water-soluble dexamethasone i.p. two hours prior to dosing i.v. with liposomes composing 1100 nmol each of DOTAP/2.5 mol % dexamethasone palmitate/SUV and DMPC/5 mol % dexamethasone palmitate/MLV. After two minutes, mice were dosed i.v. with about 80 ug of a single plasmid DNA containing one expression cassette for one of the five SARS-CoV2-specific mAbs. Mice were bled at days 1, 8, 22, 30, 36, 50, 78, 92, 106, and 120 after treatment and serum mAb protein levels were determined by a human IgG ELISA assay. Results are shown in FIG. 66 (left axis, pink bar graphs represent mean + or −SEM shown in ascending order from day 1 to day 120 for each mAb). The functional bioactivity of SARS-CoV2-specific mAb containing sera to inhibit SARS-CoV2 spike-human ACE2 protein interactions was determined by a commercially-available in vitro SARS-CoV2 spike/ACE2 blocking assay (cPASS, right axis, green dots represent mean + or −SEM shown in ascending order from day 1 to day 120 for each mAb clone, Genscript).

[0251] This example demonstrates, as shown in FIG. 66, that one injection of different single DNA expression plasmids each encoding one of five different SARS-CoV2-specific mAb produces fully neutralizing serum levels of each SARS-CoV2-specific mAb for the full experimental course of at least 120 days following administration, and that these ongoing serum mAb levels functionally and continuously block SARS-CoV2 spike-human ACE2 binding for at least 120 days (which is the human equivalent of greater than 20 years). These results demonstrate that this protocol, which includes a DNA injection encoding a single SARS-CoV2-specific mAb, can produce durable (greater than 20 human years equivalence) of neutralizing anti-SARS-CoV2 serum levels.

### Example 23

### Expression of Two Anti-SARS-CoV2 mAb from a Single Plasmid

[0252] This example describes expression of two SARS-CoV-2 antibodies from a single plasmid (4 different plasmids) in mice produces neutralizing levels of mAb using the following injection protocol. The expressed SARS-CoV-2 antibodies were as follows: first plasmid (C135+CV07-209); second plasmid (RBD215 LALA+CV07-209); third plasmid (C121+CV07-209); and fourth plasmid (CV07-209+Zost-2355) (see Table 7 for sequence information). At day 0, groups of mice were pretreated with 40 mg/kg water-soluble dexamethasone i.p. two hours prior to dosing i.v. with liposomes composing 1100 nmol each of DOTAP/2.5 mol % dexamethasone palmitate/SUV and DMPC/5 mol % dexamethasone palmitate/MLV. After two minutes, mice were dosed i.v. with about 80 ug of a single plasmid DNA containing two expression cassettes for SARS-CoV2-specific mAbs. Mice were bled at days 1, 8, 22, 30, 36, 50, 78, 92, 106, 120, and 134 after treatment and serum mAb protein levels were determined by a human IgG ELISA assay. The results are shown in FIG. 67 (left axis, pink bar graphs represent mean + or −SEM shown in ascending order from day 1 to day 134 for each mAb). The functional bioactivity capacity of SARS-CoV2-specific mAb containing sera to inhibit SARS-CoV2 spike-human ACE2 protein interactions was determined by a commercially-available in vitro SARS-CoV2 spike/ACE2 blocking assay (cPASS, right axis, green dots represent mean + or −SEM shown in ascending order from day 1 to day 134 for each mAb clone, Genscript).

[0253] This example demonstrates, as shown in FIG. 67, that this procedure with a single injection of a single expression plasmid results in expression of two SARS-CoV2-specific mAbs from a single plasmid for the course of at least 134 days following this procedure, and that these serum-expressed mAbs sera are functionally capable of blocking SARS-CoV2 spike-human ACE2 interactions for at least 134 days.

### Example 24

### Expression of Two Anti-SARS-CoV2 mAbs by Three Approaches

[0254] This example describes expression of two anti-SARS-CoV2 mAbs simultaneously by three different approaches: 1) Single injection of a single expression plasmid coding two unique mAbs; 2) Single injection of two unique plasmids simultaneously as a mixture (co-injection); and 3) Two injections of single mAb expression plasmids separated by an amount of time, here 7 days (reinj). The various anti-SARS-CoV2 mAbs expressed are shown in FIGS. 68A-68B (see Table 7 for sequences).

[0255] On day 0, groups of mice were pretreated with 40 mg/kg water-soluble dexamethasone i.p. two hours prior to dosing i.v. with liposomes composing 1000 nmol each of DOTAP/2.5 mol % dexamethasone palmitate/SUV and DMPC/5 mol % dexamethasone palmitate/MLV. After two minutes, mice were dosed i.v. with either 75 ug of a single plasmid DNA containing one or two expression cassettes for SARS-CoV2-specific mAbs, or 38 ug each of two plasmids each containing cassettes for one or two mAb clones (co-inject—“coinj”). On day 7, some of these groups of mice underwent an additional injection (re-injection—“reinj”) of dexamethasone retreatment, liposomes dosing, and plasmid DNA as on day 0, and were similarly treated with either 75 ug of a single plasmid DNA containing two expression cassettes for SARS-CoV2-specific mAbs. Mice were bled at day 1, 8, and 15, 22 and serum expression of mAbs was analyzed by a human IgG ELISA assay. Results are shown in FIG. 68A, where each series of bar graphs indicates mean+/−SEM mAb expression or inhibition amount at days 1, 8, 15, and 22 in order from left to right.

[0256] FIG. 68B shows the functional capacity of the SARS-CoV2-specific mAb containing sera to inhibit SARS-CoV2 spike-human ACE2 protein interactions determined by a commercially-available in vitro SARS-CoV2 spike/ACE2 blocking assay (cPASS, Genscript). Each series of bar graphs indicates mean+/−SEM mAb expression or inhibition amount at days 1, 8, 15, and 22 in order from left to right.

[0257] This examples shows (results in FIGS. 68A-68B) how this protocol produces two anti-SARS-CoV2 mAbs simultaneously by the three approaches tried. All approaches successfully allow for the expression of two mAbs in serum of animals at levels that allow for neutralization of SARS-CoV2/ACE2 interactions.

### Example 25

### Expression of Three Anti-SARS-CoV2 mAbs

[0258] This example describes expression of three different anti-SARS-CoV2 mAbs from one or two plasmids based on two weekly injections of the plasmids. This was performed with three different collections of mAbs, as shown in FIG. 69 (sequences in Table 7).

[0259] At day 0, groups of mice were pretreated with 40 mg/kg water-soluble dexamethasone i.p. two hours prior to dosing i.v. with liposomes composing 1000 nmol each of DOTAP/2.5 mol % dexamethasone palmitate/SUV and DMPC/5 mol % dexamethasone palmitate/MLV. After two minutes, mice were dosed i.v. with 80 ug of a single plasmid DNA containing one expression cassette for SARS-CoV2-specific mAbs. On day 7, these groups of mice underwent an additional injection of dexamethasone pretreatment, liposomes dosing, and plasmid DNA as on day 0. These groups were treated with 80 ug of a single plasmid DNA containing two expression cassettes for SARS-CoV2-specific mAbs.

[0260] Mice were bled at days 1, 8, 15, 21, 36, 50, 64, 78, 92, 106, 120 following their first treatment, and serum expression levels of mAbs were analyzed by a human IgG ELISA assay. The results are shown in FIG. 69, where each series of bar graphs indicates mean+/−SEM mAb expression (left y-axis) at days 1, 8, 15, 21, 36, 50, 64, 78, 92, 106, 120 in order from left to right. In parallel, functional capacities of SARS-CoV2-specific mAb containing sera to inhibit SARS-CoV2 spike-human ACE2 protein interactions were determined by a commercially-available in vitro SARS-CoV2 spike/ACE2 blocking assay across the timecourse (cPASS, Genscript). These inhibition results are shown in FIG. 69 in green. Each series of bar graphs indicates mean+/−SEM mAb inhibition (right y-axis) at days 1, 8, 15, 21, 36, 50, 78, 92, 106, 120.

[0261] These examples demonstrate that two weekly injections of one or two DNA expression plasmids encoding a total of three different individual SARS-CoV2-specific mAbs produces fully neutralizing serum levels of three different SARS-CoV2-specific mAbs for the course of at least 70 days following administration, and that these ongoing serum mAbs levels functionally and continuously block SARS-CoV2 spike-human ACE2 for at least 70 days, which is the human equivalent of greater than 10 years. These results indicate that two weekly hedges DNA injections encoding three different SARS-CoV2-specific mAbs produce durable (greater than 10 human years equivalence) fully neutralizing anti-SARS-CoV2 mAb serum levels.

### Example 26

### Expression of Four Anti-SARS-CoV2 mAbs

[0262] This example describes expression of four (4) anti-SARS-CoV2 mAbs shown in FIG. 70 (see Table 7 for sequence information) using the following protocol. At day 0, groups of mice were pretreated with 40 mg/kg water-soluble dexamethasone i.p. two hours prior to dosing i.v. with liposomes composing 1000 nmol each of DOTAP/2.5 mol % dexamethasone palmitate/SUV and DMPC/5 mol % dexamethasone palmitate/MLV. After two minutes, mice were dosed i.v. with 40 ug each of two plasmids each containing two mAb expression cassettes.

[0263] Mice were bled at days 1, 8, 15, 21, 36, 50, 64, 78, 92 and 106 following their first treatment, and serum expression levels of mAbs were analyzed by a human IgG ELISA assay. Results are shown in FIG. 70, where each series of bar graphs indicates mean+/−SEM mAb expression (left y-axis) at days 1, 8, 15, 21, 36, 50, 64, 78, 92, and 106 in order from left to right. In parallel, functional capacities of SARS-CoV2-specific mAb containing sera to inhibit SARS-CoV2 spike-human ACE2 protein interactions were determined by a commercially-available in vitro SARS-CoV2 spike/ACE2 blocking assay across the timecourse (cPASS, Genscript). Each series of bar graphs indicates mean+/−SEM mAb inhibition (right y-axis) at days 1, 8, 15, 21, 36, 50, 78, 92 and 106.

### Example 27

### Expression of Four Anti-SARS-CoV2 mAbs with One Injection

[0264] This example describes expression of four anti-SARS-CoV2 mAbs shown in FIG. 71 (see Table 7 for sequence information) using the following protocol. At day 0, groups of mice were pretreated with 40 mg/kg water-soluble dexamethasone i.p. two hours prior to dosing i.v. with liposomes composing 1000 nmol each of DOTAP/2.5 mol % dexamethasone palmitate/SUV and DMPC/5 mol % dexamethasone palmitate/MLV. After two minutes, mice were dosed i.v. with 40 ug each of two plasmids each containing two mAb expression cassettes.

[0265] Mice were bled at days 1, 8, 15, 21, 36, 50, 64, 78, and 92 following their first treatment, and serum expression levels of SARS-CoV2 mAbs were analyzed by a human IgG ELISA assay. Results are shown in FIG. 71, where each series of bar graphs indicates mean+/−SEM mAb expression (left y-axis) at days 1, 8, 15, 21, 36, 50, 64, 78, and 92 in order from left to right. In parallel, functional capacities of SARS-CoV2-specific mAb containing sera to inhibit SARS-CoV2 spike-human ACE2 protein interactions were determined by a commercially-available in vitro SARS-CoV2 spike/ACE2 blocking assay across the timecourse (cPASS, Genscript). Each series of bar graphs (in green in FIG. 71) indicates mean+/−SEM mAb inhibition (right y-axis) at days 1, 8, 15, 21, 36, 50, 64, 78 and 92 in order from left to right.

### Example 28

### Expression of Four Anti-SARS-CoV2 mAbs

[0266] This example describes expression of four anti-SARS-CoV2 mAbs shown in FIG. 72 (see Table 7 for sequence information) using the following protocol. At day 0, groups of mice were pretreated with 40 mg/kg water-soluble dexamethasone i.p. two hours prior to dosing i.v. with liposomes composing 1000 nmol each of DOTAP/2.5 mol % dexamethasone palmitate/SUV and DMPC/5 mol % dexamethasone palmitate/MLV. After two minutes, mice were dosed i.v. with 45 ug each of two plasmids each containing two mAb expression cassettes.

[0267] Mice were bled at days 1, 8, 22, 36, 50, 64, 78, 99 following their first treatment, and serum expression levels of mAbs were analyzed by a human IgG ELISA assay. Results are shown in FIG. 72, where each series of bar graphs indicates mean+/−SEM mAb expression (left y-axis) at days 1, 8, 22, 36, 50, 64, 78, 99 in order from left to right. In parallel, functional capacities of SARS-CoV2-specific mAb containing sera to inhibit SARS-CoV2 spike-human ACE2 protein interactions were determined by a commercially-available in vitro SARS-CoV2 spike/ACE2 blocking assay across the timecourse (cPASS, Genscript). These results are shown in green, where each series of bar graphs indicates mean+/−SEM mAb inhibition (right y-axis) at days 1, 8, 22, 36, 50, 64, 78, 99.

[0268] These examples demonstrate that a single co-injection of two different single DNA expression plasmids each encoding two different individual SARS-CoV2-specific mAbs (together the co-injection produces a total of four different individual SARS-CoV2-specific mAbs) produces fully neutralizing serum levels of four different SARS-CoV2-specific mAbs for at least 90 days following administration, and that these ongoing serum mAb levels functionally and continuously blocked SARS-CoV2 spike-human ACE2 binding for at least 90 days, which is the human equivalent of greater than 15 years.

### Example 29

### Expression of Four Anti-SARS-CoV2 mAbs with Two Injections

[0269] This example describes expression of four anti-SARS-CoV2 mAbs shown in FIG. 73 (see Table 7 for sequence information) using the following protocol. At day 0, groups of mice were pretreated with 40 mg/kg water-soluble dexamethasone i.p. two hours prior to dosing i.v. with liposomes composing 1000 nmol each of DOTAP/2.5 mol % dexamethasone palmitate/SUV and DMPC/5 mol % dexamethasone palmitate/MLV. After two minutes, mice were dosed i.v. with 80 ug of a single plasmid DNA containing two expression cassettes for SARS-CoV2-specific mAbs.

[0270] On day 7, mice underwent an additional injection of dexamethasone pretreatment, liposomes dosing, and plasmid DNA as on day 0 (indicated by hashed bar). Mice were treated with 80 ug of a single plasmid DNA containing two expression cassettes for SARS-CoV2-specific mAbs.

[0271] Mice were bled at days 1, 8, 15, 21, 36, 50, 64, 78, 92, 106, 120 following their first treatment, and serum expression levels of mAbs were analyzed by a human IgG ELISA assay. Results are shown in FIG. 73, where each series of bar graphs indicates mean+/−SEM mAb expression (left y-axis) at days 1, 8, 15, 21, 36, 50, 64, 78, 92, 106, 120 in order from left to right. In parallel, functional capacities of SARS-CoV2-specific mAb containing sera to inhibit SARS-CoV2 spike-human ACE2 protein interactions were determined by a commercially-available in vitro SARS-CoV2 spike/ACE2 blocking assay across the timecourse (cPASS, Genscript). Each series of bar graphs (in green in FIG. 73) indicates mean+/−SEM mAb inhibition (right y-axis) at days 1, 8, 15, 21, 36, 50, 78, 92, 106, 120.

### Example 30

### Expression of Four Anti-SARS-CoV2 mAbs with Two Injections

[0272] This example describes expression of four anti-SARS-CoV2 mAbs shown in FIG. 74 (see Table 7 for sequence information) using the following protocol. At day 0, groups of mice were pretreated with 40 mg/kg water-soluble dexamethasone i.p. two hours prior to dosing i.v. with liposomes composing 1000 nmol each of DOTAP/2.5 mol % dexamethasone palmitate/SUV and DMPC/5 mol % dexamethasone palmitate/MLV. After two minutes, mice were dosed i.v. with 80 ug of a single plasmid DNA containing two expression cassettes for SARS-CoV2-specific mAbs.

[0273] On day 7, some of these groups of mice underwent a second round of injection of dexamethasone pretreatment, liposomes dosing, and plasmid DNA as on day 0 (indicated by dot fill pattern). These groups were treated with 40 ug each of two plasmids each containing two mAb expression cassettes. Mice were bled at days 1, 8, 15, 21, 36, 50, 64, 78, and 92 following their first treatment, and serum expression levels of SARS-CoV2 mAbs were analyzed by a human IgG ELISA assay. Results are shown in FIG. 74, where each series of bar graphs indicates mean+/−SEM mAb expression (left y-axis) at days 1, 8, 15, 21, 36, 50, 64, 78, and 92 in order from left to right. In parallel, functional capacities of SARS-CoV2-specific mAb containing sera to inhibit SARS-CoV2 spike-human ACE2 protein interactions were determined by a commercially-available in vitro SARS-CoV2 spike/ACE2 blocking assay across the timecourse (cPASS, Genscript). Each series of bar graphs (in green) indicates mean+/−SEM mAb inhibition (right y-axis) at days 1, 8, 15, 21, 36, 50, 64, 78 and 92 in order from left to right.

[0274] These examples demonstrate that serial, weekly co-injection of two different single DNA expression plasmids each encoding two different individual SARS-CoV2-specific mAbs (together the serial co-injection produces a total of four different individual SARS-CoV2-specific mAbs) produce fully neutralizing serum levels of four different SARS-CoV2-specific mAbs for the course of at least 70 days following administration, and that these ongoing serum mAb levels functionally and continuously blocked SARS-CoV2 spike-human ACE2 binding for at least 70 days, which is the human equivalent of greater than 10 years.

### Example 31

### Expression of Five Anti-SARS-CoV2 mAbs with Two Injections

[0275] This example describes expression of five anti-SARS-CoV2 mAbs shown in FIG. 75 (see Table 7 for sequence information) using the following protocol. At day 0, groups of mice were pretreated with 40 mg/kg water-soluble dexamethasone i.p. two hours prior to dosing i.v. with liposomes composing 1000 nmol each of DOTAP/2.5 mol % dexamethasone palmitate/SUV and DMPC/5 mol % dexamethasone palmitate/MLV. After two minutes, mice were dosed i.v. with either 80 ug of a single plasmid DNA containing one expression cassette for SARS-CoV2-specific mAbs.

[0276] On day 7, these groups of mice underwent an additional injection of dexamethasone pretreatment, liposomes dosing, and plasmid DNA as on day 0. Some groups were treated with 40 ug each of two plasmids each containing two mAb expression cassettes.

[0277] Mice were bled at days 1, 8, 15, 21, 36, 50, 64, 78, 92, 106, 120 following their first treatment, and serum expression levels of mAbs were analyzed by a human IgG ELISA assay. Results are shown in FIG. 75, where each series of bar graphs indicates mean+/−SEM mAb expression (left y-axis) at days 1, 8, 15, 21, 36, 50, 64, 78, 92, 106, 120 in order from left to right. In parallel, functional capacities of SARS-CoV2-specific mAb containing sera to inhibit SARS-CoV2 spike-human ACE2 protein interactions were determined by a commercially-available in vitro SARS-CoV2 spike/ACE2 blocking assay across the timecourse (cPASS, Genscript). Each series of bar graphs (shown in green in FIG. 75) indicates mean+/−SEM mAb inhibition (right y-axis) at days 1, 8, 15, 21, 36, 50, 78, 92, 106, 120.

### Example 32

### Expression of Six Anti-SARS-CoV2 mAbs with Single Injection

[0278] This example describes expression of six anti-SARS-CoV2 mAbs shown in FIG. 76 (see Table 7 for sequence information) using the following protocol. At day 0, groups of mice were pretreated with 40 mg/kg water-soluble dexamethasone i.p. two hours prior to dosing i.v. with liposomes composing 1000 nmol each of DOTAP/2.5 mol % dexamethasone palmitate/SUV and DMPC/5 mol % dexamethasone palmitate/MLV. After two minutes, mice were dosed i.v. with 30 ug each of three plasmids each containing two mAb expression cassettes.

[0279] Mice were bled at days 1, 8, 22, 36, 50, 64, 78, 99 following their first treatment, and serum expression levels of mAbs were analyzed by a human IgG ELISA assay. Results are shown in FIG. 76, where each series of bar graphs indicates mean+/−SEM mAb expression (left y-axis) at days 1, 8, 22, 36, 50, 64, 78, 99 in order from left to right. In parallel, functional capacities of SARS-CoV2-specific mAb containing sera to inhibit SARS-CoV2 spike-human ACE2 protein interactions were determined by a commercially-available in vitro SARS-CoV2 spike/ACE2 blocking assay across the time course (cPASS, Genscript). Each series of bar graphs (in green in FIG. 76) indicates mean+/−SEM mAb inhibition (right y-axis) at days 1, 8, 22, 36, 50, 64, 78, 99.

### Example 33

### Expression of Six Anti-SARS-CoV2 mAbs with Two Injections

[0280] This example describes expression of six anti-SARS-CoV2 mAbs shown in FIG. 77 (see Table 7 for sequence information) using the following protocol. At day 0, groups of mice were pretreated with 40 mg/kg water-soluble dexamethasone i.p. two hours prior to dosing i.v. with liposomes composing 1000 nmol each of DOTAP/2.5 mol % dexamethasone palmitate/SUV and DMPC/5 mol % dexamethasone palmitate/MLV. After two minutes, mice were dosed i.v. with either 80 ug of a single plasmid DNA containing two expression cassettes for SARS-CoV2-specific mAbs, or 40 ug each of two plasmids each containing one or two mAb expression cassettes.

[0281] On day 7, these groups of mice underwent an additional injection of dexamethasone pretreatment, liposomes dosing, and plasmid DNA as on day 0. These groups were treated with either 80 ug of a single plasmid DNA containing two expression cassettes for SARS-CoV2-specific mAbs, or 40 ug each of two plasmids each containing two mAb expression cassettes.

[0282] Mice were bled at days 1, 8, 15, 21, 36, 50, 64, 78, 92, 106, 120 following their first treatment, and serum expression levels of mAbs were analyzed by a human IgG ELISA assay. Results are shown in FIG. 77, where each series of bar graphs indicates mean+/−SEM mAb expression (left y-axis) at days 1, 8, 15, 21, 36, 50, 64, 78, 92, 106, 120 in order from left to right. In parallel, functional capacities of SARS-CoV2-specific mAb containing sera to inhibit SARS-CoV2 spike-human ACE2 protein interactions were determined by a commercially-available in vitro SARS-CoV2 spike/ACE2 blocking assay across the time course (cPASS, Genscript). Each series of bar graphs (in green in FIG. 77) indicates mean+/−SEM mAb inhibition (right y-axis) at days 1, 8, 15, 21, 36, 50, 78, 92, 106, 120.

### Example 34

### Expression of Six Anti-SARS-CoV2 mAbs 2 or 3 Injections

[0283] This example describes expression of six anti-SARS-CoV2 mAbs shown in FIG. 78 (see Table 7 for sequence information) using the following protocol. At day 0, groups of mice were pretreated with 40 mg/kg water-soluble dexamethasone i.p. two hours prior to dosing i.v. with liposomes composing 1000 nmol each of DOTAP/2.5 mol % dexamethasone palmitate/SUV and DMPC/5 mol % dexamethasone palmitate/MLV. After two minutes, mice were dosed i.v. with either 80 ug of a single plasmid DNA containing two expression cassettes for SARS-CoV2-specific mAb, or 40 ug each of two plasmids each containing one or two mAb expression cassettes.

[0284] On day 7, these groups of mice underwent a second round of injection of dexamethasone pretreatment, liposomes dosing, and plasmid DNA as on day 0 (indicated by dot fill pattern). These groups were treated 40 ug each of two plasmids each containing two mAb expression cassettes.

[0285] On day 14, some of these groups of mice underwent a third round of injection of dexamethasone pretreatment, liposomes dosing, and plasmid DNA as on day 0. These groups were treated with 80 ug of a single plasmid DNA containing two expression cassettes for SARS-CoV2-specific mAb.

[0286] Mice were bled at days 1, 8, 15, 21, 36, 50, 64, 78, and 92 following their first treatment, and serum expression levels of SARS-CoV2 mAbs were analyzed by a human IgG ELISA assay. Results are shown in FIG. 78, where each series of bar graphs indicates mean+/−SEM mAb expression (left y-axis) at days 1, 8, 15, 21, 36, 50, 64, 78, and 92 in order from left to right. In parallel, functional capacities of SARS-CoV2-specific mAb containing sera to inhibit SARS-CoV2 spike-human ACE2 protein interactions were determined by a commercially-available in vitro SARS-CoV2 spike/ACE2 blocking assay across the timecourse (cPASS, Genscript). Each series of bar graphs (in green in FIG. 78) indicates mean+/−SEM mAb inhibition (right y-axis) at days 1, 8, 15, 21, 36, 50, 64, 78 and 92 in order from left to right.

[0287] These examples demonstrate that serial co-injection of three different single DNA expression plasmids each encoding two different individual SARS-CoV2-specific mAbs (together the serial injections produce a total of six different individual SARS-CoV2-specific mAbs) each produce fully neutralizing serum levels of six different SARS-CoV2-specific mAbs for the course of at least 90 days following administration, and that these ongoing serum mAbs levels produced functionally block SARS-CoV2 spike-human ACE2 binding and that these functionally and continuously blocked SARS-CoV2 spike-human ACE2 binding for at least 90 days, which is the human equivalent of greater than 15 years.

### Example 35

### Expression of Eight Anti-SARS-CoV2 mAbs with Two Injections

[0288] This example describes expression of eight anti-SARS-CoV2 mAbs shown in FIG. 79 (see Table 7 for sequence information) using the following protocol. At day 0, groups of mice were pretreated with 40 mg/kg water-soluble dexamethasone i.p. two hours prior to dosing i.v. with liposomes composing 1000 nmol each of DOTAP/2.5 mol % dexamethasone palmitate/SUV and DMPC/5 mol % dexamethasone palmitate/MLV. After two minutes, mice were dosed i.v. with 40 ug each of two plasmids each containing two mAb expression cassettes.

[0289] On day 7, mice underwent an additional injection of dexamethasone pretreatment, liposome dosing, and plasmid DNA as on day 0. Mice were treated with 40 ug each of two plasmids each containing two mAb expression cassettes.

[0290] Mice were bled at days 1, 8, 15, 21, 36, 50, 64, 78, 92, 106, 120 following their first treatment, and serum expression levels of mAbs were analyzed by a human IgG ELISA assay. Results are shown in FIG. 79, where each series of bar graphs indicates mean+/−SEM mAb expression (left y-axis) at days 1, 8, 15, 21, 36, 50, 64, 78, 92, 106, 120 in order from left to right. In parallel, functional capacities of SARS-CoV2-specific mAb containing sera to inhibit SARS-CoV2 spike-human ACE2 protein interactions were determined by a commercially-available in vitro SARS-CoV2 spike/ACE2 blocking assay across the time course (cPASS, Genscript). Each series of bar graphs (green in FIG. 79) indicates mean+/−SEM mAb inhibition (right y-axis) at days 1, 8, 15, 21, 36, 50, 78, 92, 106, 120.

### Example 36

### Expression of Eight Anti-SARS-CoV2 mAbs with Two Injections

[0291] This example describes expression of eight anti-SARS-CoV2 mAbs shown in FIG. 80 (see Table 7 for sequence information) using the following protocol. At day 0, groups of mice were pretreated with 40 mg/kg water-soluble dexamethasone i.p. two hours prior to dosing i.v. with liposomes composing 1000 nmol each of DOTAP/2.5 mol % dexamethasone palmitate/SUV and DMPC/5 mol % dexamethasone palmitate/MLV. After two minutes, mice were dosed i.v. with 40 ug each of two plasmids each containing two mAb expression cassettes.

[0292] On day 7, mice underwent a second round of injection of dexamethasone pretreatment, liposomes dosing, and plasmid DNA as on day 0. These mice were treated with 40 ug each of two plasmids each containing two mAb expression cassettes.

[0293] Mice were bled at days 1, 8, 15, 21, 36, 50, 64, 78, and 92 following their first treatment, and serum expression levels of SARS-CoV2 mAbs were analyzed by a human IgG ELISA assay. Results are shown in FIG. 80, where each series of bar graphs indicates mean+/−SEM mAb expression (left y-axis) at days 1, 8, 15, 21, 36, 50, 64, 78, and 92 in order from left to right. In parallel, functional capacities of SARS-CoV2-specific mAb containing sera to inhibit SARS-CoV2 spike-human ACE2 protein interactions were determined by a commercially-available in vitro SARS-CoV2 spike/ACE2 blocking assay across the time course (cPASS, Genscript). Each series of bar graphs (shown in green in FIG. 80) indicates mean+/−SEM mAb inhibition (right y-axis) at days 1, 8, 15, 21, 36, 50, 64, 78 and 92 in order from left to right.

### Example 37

### Expression of Eight Anti-SARS-CoV2 mAbs with Three Injections

[0294] This example describes expression of eight anti-SARS-CoV2 mAbs shown in FIG. 81 (see Table 7 for sequence information) using the following protocol. At day 0, groups of mice were pretreated with 40 mg/kg water-soluble dexamethasone i.p. two hours prior to dosing i.v. with liposomes composing 1000 nmol each of DOTAP/2.5 mol % dexamethasone palmitate/SUV and DMPC/5 mol % dexamethasone palmitate/MLV. After two minutes, mice were dosed i.v. with 40 ug each of two plasmids each containing two mAb expression cassettes.

[0295] On day 7, mice underwent a second round of injection of dexamethasone pretreatment, liposomes dosing, and plasmid DNA as on day 0. These groups were treated with 80 ug of a single plasmid DNA containing two expression cassettes for SARS-CoV2-specific mAbs.

[0296] On day 14, mice underwent a third round of injection of dexamethasone pretreatment, liposomes dosing, and plasmid DNA as on day 0 (indicated by hashed bar). These groups were treated with 80 ug each of a single plasmid containing two mAb expression cassettes.

[0297] Mice were bled at days 1, 8, 15, 21, 36, 50, 64, 78, and 92 following their first treatment, and serum expression levels of SARS-CoV2 mAbs were analyzed by a human IgG ELISA assay. Results are shown in FIG. 81, where each series of bar graphs indicates mean+/−SEM mAb expression (left y-axis) at days 1, 8, 15, 21, 36, 50, 64, 78, and 92 in order from left to right. In parallel, functional capacities of SARS-CoV2-specific mAb containing sera to inhibit SARS-CoV2 spike-human ACE2 protein interactions were determined by a commercially-available in vitro SARS-CoV2 spike/ACE2 blocking assay across the time course (cPASS, Genscript). Each series of bar graphs (green in FIG. 81) indicates mean+/−SEM mAb inhibition (right y-axis) at days 1, 8, 15, 21, 36, 50, 64, 78 and 92 in order from left to right.

### Example 38

### Expression of Eight Anti-SARS-CoV2 mAbs

[0298] This example describes expression of eight anti-SARS-CoV2 mAbs shown in FIG. 82 (see Table 7 for sequence information) using the following protocol. At day 0, groups of mice were pretreated with 40 mg/kg water-soluble dexamethasone i.p. two hours prior to dosing i.v. with liposomes composing 1000 nmol each of DOTAP/2.5 mol % dexamethasone palmitate/SUV and DMPC/5 mol % dexamethasone palmitate/MLV. After two minutes, mice were dosed i.v. with 40 ug each of two plasmids each containing one or two mAb expression cassettes.

[0299] On day 7, these groups of mice underwent a second round of injection of dexamethasone pretreatment, liposomes dosing, and plasmid DNA as on day 0. These groups were treated with either 80 ug of a single plasmid DNA containing two expression cassettes for SARS-CoV2-specific mAb, or 40 ug each of two plasmids each containing two mAb expression cassettes.

[0300] On day 14, some of these groups of mice underwent a third round of injection of dexamethasone pretreatment, liposomes dosing, and plasmid DNA as on day 0 (indicated by hashed bar). These groups were treated with 80 ug of a single plasmid DNA containing two expression cassettes for SARS-CoV2-specific mAbs.

[0301] Mice were bled at days 1, 8, 15, 21, 36, 50, 64, 78, and 92 following their first treatment, and serum expression levels of SARS-CoV2 mAbs were analyzed by a human IgG ELISA assay. Results are shown in FIG. 82, where each series of bar graphs indicates mean+/−SEM mAb expression (left y-axis) at days 1, 8, 15, 21, 36, 50, 64, 78, and 92 in order from left to right. In parallel, functional capacities of SARS-CoV2-specific mAb containing sera to inhibit SARS-CoV2 spike-human ACE2 protein interactions were determined by a commercially-available in vitro SARS-CoV2 spike/ACE2 blocking assay across the time course (cPASS, Genscript). Each series of bar graphs (green in FIG. 82) indicates mean+/−SEM mAb inhibition (right y-axis) at days 1, 8, 15, 21, 36, 50, 64, 78 and 92 in order from left to right.

### Example 39

### Expression of 10 Anti-SARS-CoV2 mAbs with Other Protein and mAbs

[0302] This example describes expression of ten anti-SARS-CoV2 mAbs shown in FIG. 83 (see Table 7 for sequence information), and other proteins and mAbs, using the following protocol. At day 0, groups of mice were pretreated with 40 mg/kg water-soluble dexamethasone i.p. two hours prior to dosing i.v. with liposomes composing 1000 nmol each of DOTAP/2.5 mol % dexamethasone palmitate/SUV and DMPC/5 mol % dexamethasone palmitate/MLV. After two minutes, mice were dosed i.v. with 40 ug each of two plasmids each containing one or two mAb expression cassettes.

[0303] On day 7, these groups of mice underwent a second round of injection of dexamethasone pretreatment, liposomes dosing, and plasmid DNA as on day 0 (indicated by dot fill pattern). These groups were treated with 40 ug each of two plasmids each containing two mAb expression cassettes.

[0304] On day 14, these groups of mice underwent a third round of injection of dexamethasone pretreatment, liposomes dosing, and plasmid DNA as on day 0. These groups were treated with 80 ug of a single plasmid DNA containing two expression cassettes for SARS-CoV2-specific mAb clones.

[0305] On day 21, some of these groups of mice underwent a fourth round of injection of dexamethasone pretreatment, liposomes dosing, and plasmid DNA as on day 0. These groups were treated with 80 ug of a single plasmid DNA containing two expression cassettes for non-SARS-CoV2-related proteins. These non-SARS-CoV2-related proteins included mepoluzimab (aIL5), and anti-influenza A hemagglutinin H1 (5J8).

[0306] Mice were bled at days 1, 8, 15, 21, 36, 50, 64, 78, and 92 following their first treatment, and serum expression levels of SARS-CoV2 mAbs were analyzed by a human IgG ELISA assay. Results are shown in FIG. 83, where each series of bar graphs indicates mean+/−SEM mAb expression (left y-axis) at days 1, 8, 15, 21, 36, 50, 64, 78, and 92 in order from left to right. In parallel, functional capacities of SARS-CoV2-specific mAb containing sera to inhibit SARS-CoV2 spike-human ACE2 protein interactions were determined by a commercially-available in vitro SARS-CoV2 spike/ACE2 blocking assay across the time course (cPASS, Genscript). Each series of bar graphs (green in FIG. 83) indicates mean+/−SEM mAb inhibition (right y-axis) at days 1, 8, 15, 21, 36, 50, 64, 78 and 92 in order from left to right.

### Example 40

### Expression of 11 Anti-SARS-CoV2 mAbs with Other Protein and mAbs

[0307] This example describes expression of eleven anti-SARS-CoV2 mAbs shown in FIG. 84 (see Table 7 for sequence information), and other proteins and mAbs, using the following protocol. At day 0, groups of mice were pretreated with 40 mg/kg water-soluble dexamethasone i.p. two hours prior to dosing i.v. with liposomes composing 1000 nmol each of DOTAP/2.5 mol % dexamethasone palmitate/SUV and DMPC/5 mol % dexamethasone palmitate/MLV. After two minutes, mice were dosed i.v. with 40 ug each of two plasmids each containing two mAb expression cassettes.

[0308] On day 7, these groups of mice underwent a second round of injection of dexamethasone pretreatment, liposomes dosing, and plasmid DNA as on day 0. These groups were treated with 40 ug each of two plasmids each containing two mAb expression cassettes.

[0309] On day 14, these groups of mice underwent a third round of injection of dexamethasone pretreatment, liposomes dosing, and plasmid DNA as on day 0. These groups were treated with 40 ug each of two plasmids each containing two mAb expression cassettes.

[0310] On day 21, these groups of mice underwent a fourth round of injection of dexamethasone pretreatment, liposomes dosing, and plasmid DNA as on day 0. These groups were treated with either 80 ug of a single plasmid DNA containing two or more expression cassettes for non-SARS-CoV2-related proteins, 40 ug each of two plasmids each containing two non-SARS-CoV2-related proteins, or 25 ug each of three plasmids each containing two non-SARS-CoV2-specific protein expression cassettes. These non-SARS-CoV2-related proteins included human growth hormone (GH), galactosidase alpha (GLA), G-CSF, and mAbs rituximab (aCD20), mepoluzimab (aIL5), and anti-influenza A hemagglutinin H1 (5J8).

[0311] Mice were bled at days 1, 8, 15, 21, 36, 50, 64, 78, and 92 following their first treatment, and serum expression levels of SARS-CoV2 mAbs were analyzed by a human IgG ELISA assay. Results are shown in FIG. 84, where each series of bar graphs indicates mean+/−SEM mAb expression (left y-axis) at days 1, 8, 15, 21, 36, 50, 64, 78, and 92 in order from left to right. In parallel, functional capacities of SARS-CoV2-specific mAb containing sera to inhibit SARS-CoV2 spike-human ACE2 protein interactions were determined by a commercially-available in vitro SARS-CoV2 spike/ACE2 blocking assay across the time course (cPASS, Genscript). Each series of bar graphs (green in FIG. 84) indicates mean+/−SEM mAb inhibition (right y-axis) at days 1, 8, 15, 21, 36, 50, 64, 78 and 92 in order from left to right.

[0312] These examples demonstrate that serial co-injection of up to six different single DNA expression plasmids, each plasmid encoding two different individual SARS-CoV2-specific mAbs (together the serial injections produce a total of up to 11 different individual SARS-CoV2-specific mAbs) produce neutralizing serum levels of up to 11 different SARS-CoV2-specific mAbs for the course of at least 90 days following administration, and that these ongoing serum mAbs levels functionally and continuously blocked SARS-CoV2 spike-human ACE2 binding for at least 90 days, which is the human equivalent of greater than 15 years.

### Example 41

### Expression of 10 Anti-SARS-CoV2 mAbs with Other Protein and mAbs

[0313] This example describes expression of ten anti-SARS-CoV-2 mAbs shown in FIG. 85 (see Table 7 for sequence information), and other non-Sars-CoV-2 mAbs, using the following protocol. At day 0, groups of mice were pretreated with 40 mg/kg water-soluble dexamethasone i.p. two hours prior to dosing i.v. with liposomes composing 1000 nmol each of DOTAP/2.5 mol % dexamethasone palmitate/SUV and DMPC/5 mol % dexamethasone palmitate/MLV. After two minutes, mice were dosed i.v. with 40 ug each of two plasmids each containing two mAb expression cassettes.

[0314] On day 7, mice underwent a second round of injection of dexamethasone pretreatment, liposomes dosing, and plasmid DNA as on day 0 (indicated by dot fill pattern). Mice were treated with 40 ug each of two plasmids each containing two mAb expression cassettes.

[0315] On day 14, mice underwent a third round of injection of dexamethasone pretreatment, liposomes dosing, and plasmid DNA as on day 0 (indicated by hashed bar). These mice were treated with 80 ug of a single plasmid DNA containing two expression cassettes for SARS-CoV2-specific mAbs.

[0316] On day 21, mice underwent a fourth round of injection of dexamethasone pretreatment, liposomes dosing, and plasmid DNA as on day 0. These groups were treated with 80 ug of a single plasmid DNA containing two expression cassettes for non-SARS-CoV2-related proteins. These non-SARS-CoV2-related proteins included mepoluzimab biosimilar (aTL5), and anti-influenza A hemagglutinin H1 (5J8).

[0317] Mice were bled at days 1, 8, 15, 21, 36, 50, 64, 78, and 92 following their first treatment, and serum expression levels of SARS-CoV2 mAbs were analyzed by a human IgG ELISA assay. Results are shown in FIG. 85, where each series of bar graphs indicates mean+/−SEM mAb expression (left y-axis) at days 1, 8, 15, 21, 36, 50, 64, 78, and 92 in order from left to right. In parallel, functional capacities of SARS-CoV2-specific mAb containing sera to inhibit SARS-CoV2 spike-human ACE2 protein interactions were determined by a commercially-available in vitro SARS-CoV2 spike/ACE2 blocking assay across the time course (cPASS, Genscript). Each series of bar graphs indicates (green in FIG. 85) mean+/−SEM mAb inhibition (right y-axis) at days 1, 8, 15, 21, 36, 50, 64, 78 and 92 in order from left to right.

[0318] This example demonstrates that serial co-injection of a total of 6 different single DNA expression plasmids, 5 of which encode two different individual SARS-CoV2-specific mAbs and the sixth encodes the heavy and light chains cDNAs of mAb 5J8, which is directed against the 1918 pandemic influenza virus. Together these serial injections produced neutralizing levels of a total of 10 different individual SARS-CoV2-specific serum mAb proteins together with one 1918 pandemic influenza specific serum mAb protein. These injections produced neutralizing serum levels of all 10 different SARS-CoV2-specific mAbs as well as neutralizing serum levels of the 1918 pandemic influenza-specific mAbs for the course of at least 90 days following administration, and that these ongoing SARS-CoV2-specific mAbs serum levels functionally and continuously blocked SARS-CoV2 spike-human ACE2 binding. In addition, hedges produced anti-pandemic influenza A mAb 5J8 serum levels neutralized the Cal/09 pandemic influenza virus strain for at least 90 days, which is the human equivalent of greater than 15 years. This means that a total of four serial DNA vector administrations can neutralize both the SARS-CoV-2 virus as well as a pandemic influenza virus for decades thereafter.

### Example 42

### SARS-CoV2 Inhibition by 14 Hours Post-Treatment

[0319] This example describes inhibition of SARS-CoV2 by 14 hours post-treatment with the anti-SARS-CoV-2 mAbs shown in FIGS. 86A-86B (see Table 7 for sequence information). At day 0, groups of mice were pretreated with 40 mg/kg water-soluble dexamethasone i.p. two hours prior to dosing i.v. with liposomes composing 1000 nmol each of DOTAP/2.5 mol % dexamethasone palmitate/SUV and DMPC/5 mol % dexamethasone palmitate/MLV. After two minutes, mice were dosed i.v. with 80 ug of a single plasmid DNA containing one or two expression cassettes for SARS-CoV2-specific mAbs clones.

[0320] Mice were bled at 1, 4, 8, 14, 18, 20, 24, and 48 hours following treatment with plasmid DNA, and serum expression levels of mAbs were analyzed by a human IgG ELISA assay. Results are shown in FIG. 86A, where each series of bar graphs indicates mean+/−SEM mAb expression at the indicated times (hr). In parallel, functional capacities of SARS-CoV2-specific mAb containing sera to inhibit SARS-CoV2 spike-human ACE2 protein interactions were determined by a commercially-available in vitro SARS-CoV2 spike/ACE2 blocking assay across the time course (cPASS, Genscript). Results are shown in FIG. 86B, where each series of bar graphs indicates mean+/−SEM mAb inhibition at the indicted time in hours following treatment. This example uses assaying a time course of the ability of anti-SARS-CoV-2 mAb serum levels produced over time between one and 24 hours after a single anti-SARS-CoV-2 DNA vector administration encoding either one or two anti-SARS-CoV-2 mAb heavy and light chain cDNAs to functionally block SARS-CoV2 spike-human ACE2 binding. The results demonstrate that SARS-CoV2 spike-human ACE2 binding is efficiently blocked within 8 hours of one IV hedges DNA vector injection encoding either one or two anti-SARS-CoV-2 mAbs. In contrast, neutralizing protection following two different anti-SARS-CoV-2 vaccine administration generally requires five weeks.

### Example 43

### Simultaneous Expression of Multiple Different mAb and Genes

[0321] This example describes the simultaneous expression of six different mAb and genes using a single injection. Four mice per group were injected IP with 40 mg/kg water-soluble dexamethasone. Two hours later, mice were injected i.v. with cationic liposomes containing 2.5% dexamethasone 21-palmitate, at doses shown in FIG. 87, as well as 1000 nmol DMPC liposomes containing 5% dex palmitate. Two minutes following the first i.v. injection, mice were injected with 25 ug each, 30 ug each, or 34 ug each of three DNA plasmids: one encoding anti-IL5 and 5J8, one encoding hGH and hGCSF, and one encoding an anti-SARS-CoV2 and GLA. Mice were bled the following day and sera analyzed for expression of target genes. Expression results are shown in FIG. 87. This example demonstrates that a single co-injection of three different DNA vectors, each vector encoding either two or three different human genes, produces significant serum levels of all six different human proteins.

### Example 44

### Controlled Gene Expression with Various Eukaryotic Promoters

[0322] This example describes the use of various eukaryotic promoters to express a target gene (human growth hormone). At day 0, groups of mice were pretreated with 40 mg/kg water-soluble dexamethasone i.p. two hours prior to dosing i.v. with liposomes composing 1100 nmol ea of DOTAP/2.5 mol % dexamethasone palmitate/SUV and DMPC/5 mol % dexamethasone palmitate/MLV. After two minutes, mice were dosed i.v. with 75 ug of various single plasmid DNA construct each containing an expression cassette for human growth hormone-Fc fusion driven by the promoters of heterologous genes, shown in FIG. 88. Mice were bled at days 1, 8, 22, 29, 43, 50, 84 and 120 after treatment and serum mAb protein levels were determined by a human IgG ELISA assay. Bar graphs shown for each promoter in FIG. 88 are in ascending order from day 1 to day 120 for each. Mean hGH-FC expression and SEM are displayed.

[0323] This data shows that selected changes in the identity and composition of the DNA vector promoter element within the DNA vector expression cassette allows for longitudinal control over the magnitude of protein expression and bioactivity without the use of gene switches or any other additional modification.

### Example 45

### Testing of 11 Different hGLA DNA Vectors

[0324] This example describes simultaneously testing 11 different hGLA DNA vectors, showing that they produce a spectrum of serum levels over time. This allowed, for example to identify vectors that maintain hGLA levels in the 1-19 ng/ml range. On day 0, groups of mice were pretreated with 40 mg/kg water-soluble dexamethasone IP two hours prior to i.v. injection. Liposome injection i.v. contained 1000 nmol each of DOTAP SUV with 2.5 mol % dexamethasone 21-palmitate and DMPC MLV with 5 mol % dexamethasone palmitate/MLV. Two minutes later, 75 ug DNA was injected i.v., with constructs encoding GLA as shown in FIGS. 89A-89B. Mice were bled the following day and every 7 or 14 days thereafter and sera assessed for hGLA protein production. Results are shown in FIGS. 89A-89B.

### Example 46

### Fc-Modified Protein Expression

[0325] FIG. 89A shows that multiple different FC modified human GLA cDNA-encoded hedges DNA vectors produce therapeutic serum hGLA levels (>1 ng/ml) at day one after administration. However by day eight (FIG. 89B), only the HyFc, and particularly the Hy-Fc 1xL-containing the hGLA DNA vectors remain within the GLA therapeutic range. All other 9, Fc modified DNA vectors have dropped below therapeutic levels by day eight. These results show that optimizing the Fc portion of Fc hybrid DNA vectors can greatly improve serum half-life of modified Fc containing DNA vectors.

[0326] FIG. 90 demonstrates that this Fc modifications is of clinical importance, as the use of this hyFc hGLA containing DNA vector significantly increases hGLA tissue levels in heart 104 days after a single hedges DNA vector administration. Heart is one of the most damaged target organs in GLA deficient Fabry's patients. For this example that Fc-modified GLA can be expressed in heart tissue at therapeutic levels 104 days after injection of vector: on day 0, groups of mice were pretreated with 40 mg/kg water-soluble dexamethasone IP two hours prior to i.v. injection. Liposome injection i.v. contained 1000 nmol each of DOTAP SUV with 2.5 mol % dexamethasone 21-palmitate and DMPC MLV with 5 mol % dexamethasone 21-palmitate. Two minutes later, 75 ug DNA was injected i.v., with constructs encoding GLA-Fc with point mutations as shown in FIG. 91. Mice were sacrificed at day 104 after injection. Hearts were perfused with PBS and then removed to lysis buffer on ice. Hearts were sonicated and protein quantified by Lowry. 50 ug total protein was loaded into wells and GLA measured by ELISA. Heart tissue expression levels are shown in FIG. 92.

### Example 47

### Various Fc Protein Mutations Affect Expression

[0327] This example compares the expression of various mutated Fc regions (shown in FIG. 91) for GLA-Fc expression. On day 0, groups of mice were pretreated with 40 mg/kg water-soluble dexamethasone IP two hours prior to i.v. injection. Liposome injection i.v. contained 1000 nmol each of DOTAP SUV with 2.5 mol % dexamethasone 21-palmitate and DMPC MLV with 5 mol % dexamethasone 21-palmitate. Two minutes later, 75 ug DNA was injected i.v., with constructs encoding GLA with point mutations as shown in FIG. 91. Mice were bled the following day and every 7 or 14 days thereafter and sera assessed for hGLA protein production. FIG. 91 demonstrates that targeted single or several DNA base modification of the HyFC-ixL-hGLA DNA vector via site directed mutagenesis allows precisely targeted single base modification of hybrid Fc DNA vector encoded protein function.

### Example 48

### Use of Low Dose of Dexamethasone

[0328] This example describes the use of low dose dexamethasone pretreatment does not interfere with the durability of protein expression (and acute expression may be augmented). On day 0, groups of 25 gram mice were pretreated with the indicated amounts (in FIG. 92) of water-soluble dexamethasone IP two hours prior to i.v. injection. Liposome injection i.v. contained 1000 nmol each of DOTAP SUV with 2.5 mol % dexamethasone 21-palmitate and DMPC MLV with 5 mol % dexamethasone 21-palmitate. Two minutes later, 75 ug of rituximab-biosimilar expression DNA plasmid was injected i.v. Mice were bled the following day and at day 8, 15, and 22. Serum expression of rituximab-biosimilar were determined by commercial ELISA, and shown as mean+/−SEM. Results are shown in FIG. 92, which shows that free dexamethasone, when pre-dosed in the range of 1 to 40 mg/kg dose, each maintains IV DNA vectors already high level, long term protein production, as well as their ability to limit critical toxicity markers at or closely approximating background control levels. In addition, a number of the lowest free dexamethasone doses statistically significantly increased rituximab serum protein levels at day 1 following i.v. treatment.

TABLE 7

| | | | | | Not | | | | | |
|---|---|---|---|---|---|---|---|---|---|---|
| | Ab | | | Neutral- | Neutral- | | | SEQ | | SEQ |
| | or | | Doesn't | ising | ising | Protein + | | ID | | ID |
| Name | Nb | Binds to | Bind to | Vs | Vs | Epitope | Origin | NO.: | VH or VHH | NO.: |
| 0304-2F8 | Ab | SARS-CoV2 | | | SARS-CoV2 | S; Unk | B-cells; SARS-CoV2 | 63 | EVQLVQSGAEVSQPGESLKISCKGSGYSF | 1145 |
| | | (weak) | | | | | Human Patient | | TGYWISWVRQMPGKGLEWMGIIYPGD | |
| | | | | | | | | | SDTKYTPSFQGQVTISTDKSINTAYLQWS | |
| | | | | | | | | | SLKASDTAMYYCARRGDGLYYYGMDV | |
| | | | | | | | | | WGQGTTVTVSS | |
| 0304-3H3 | Ab | SARS-CoV2 | | SARS-CoV2 | | S; S2 | B-cells; SARS-CoV2 | 64 | EVQLVESGPGLVKPSETLSLTCTASGGSI | 1146 |
| | | | | | | | Human Patient | | STYYWSWIRQPPGKGLEWIGYIYYSGST | |
| | | | | | | | | | NYNPSLKSRVTISVDTSKNQFSLKLSSVTA | |
| | | | | | | | | | ADTAVYYCARDRIAPVGKFFGWYFDLW | |
| | | | | | | | | | GRGTLVTVSS | |
| 0304-4A10 | Ab | SARS-CoV2 | | | SARS-CoV2 | S; S2 | B-cells; SARS-CoV2 | 65 | EVQLVESGGGLVQPGGSLRLSCAASGFT | 1147 |
| | | | | | | | Human Patient | | FSTYAMHWVRQAPGKGLEYVSGISSNG | |
| | | | | | | | | | GSTYYANSVKGRFTISRDNSKNTLYIQM | |
| | | | | | | | | | GSLRAEDMAVYYCARSSSRGFDYWGQ | |
| | | | | | | | | | GTLVTVSS | |
| 0304-4A2 | Ab | SARS-CoV2 | | | SARS-CoV2 | S; S1 (non- | B-cells; SARS-CoV2 | 66 | EVQLVESGPGLVKPSETLSLTCAVSGDST | 1148 |
| | | | | | | RBD) | Human Patient | | SSSSSYWDWIRQPPGKGLEWIGNIYYTG | |
| | | | | | | | | | TTYYNPSLKSRVTISVDTSKDQFSLKLSSV | |
| | | | | | | | | | TAADTAVYYCARELFTAVAGKGGIDYW | |
| | | | | | | | | | GQGTLVTVSS | |
| 0304-A1 | Ab | SARS-CoV2 | | | SARS-CoV2 | S; S2 | B-cells; SARS-CoV2 | 67 | QVQLVQSGGGVVQPGRSLRLSCAAPGF | 1149 |
| | | | | | | | Human Patient | | TFSSYGMHWVRQAPGKGLEWVAVISY | |
| | | | | | | | | | DGSNKYYADSVKGRFTISRDNSKNTLYL | |
| | | | | | | | | | QMNSLRAEDTAVYYCAKDFKGGSSSWY | |
| | | | | | | | | | TPEIEYGMDVWGQGTTVTVSS | |
| 0317-A2 | Ab | SARS-CoV2 | | | SARS-CoV2 | S; S2 | B-cells; SARS-CoV2 | 68 | QVQLVQSGSELKKPGASVKVSCKASGYT | 1150 |
| | | | | | | | Human Patient | | FTSYAMNWVRQAPGQGLEWMGWINT | |
| | | | | | | | | | NTGNPTYAQGFTGRFVFSLDTSVSTAYL | |
| | | | | | | | | | QISSLKAEDTAVYYCARLIRHEAHTYCSG | |
| | | | | | | | | | GSCYSPDYYYGMDVWGQGTMVTVSS | |
| 0317-A3 | Ab | SARS-CoV2 | | | SARS-CoV2 | S; Unk | B-cells; SARS-CoV2 | 69 | EVQLLQSGGGLVQPGGSLRLSCVASGFT | 1151 |
| | | (weak) | | | | | Human Patient | | FSSYEMINWVRQAPGKGLEWVSYISTSG | |
| | | | | | | | | | STINYADSVKGRFSISRDNAKKSLYLQM | |
| | | | | | | | | | NSLRAEDTAVYYCASNPPLGEPYFDIWG | |
| | | | | | | | | | QGTMVTVSS | |
| 0317-A7 | Ab | SARS-CoV2 | | | SARS-CoV2 | S; S1 (non- | B-cells; SARS-CoV2 | 70 | EVQLLESGGGVVQPGRSLRLSCAASGFT | 1152 |
| | | | | | | RBD) | Human Patient | | FSNYAMHWVRQAPGKGLEWVAVISYD | |
| | | | | | | | | | GSNKYYADSVKGRFTISRDNSKNTLYLQ | |
| | | | | | | | | | MNSLRAEDTAVYYCARWGGGMQYLD | |
| | | | | | | | | | VWGQGTTVTVSS | |
| 0317-A8 | Ab | SARS-CoV2 | | | SARS-CoV2 | S; S1 (non- | B-cells; SARS-CoV2 | 71 | EVQLVQSGSELKKPGASVKVSCKASGYT | 1153 |
| | | (weak) | | | | RBD) | Human Patient | | FTSYAMINWVRQAPGQGLEWMGWINT | |
| | | | | | | | | | NTGNPTYAQGFTGRFVFSLDTSVSTAYL | |
| | | | | | | | | | QISSLKAEDTAVYYCARAGPNYDFWSGY | |
| | | | | | | | | | YQTFDYWGQGTMVTVSS | |
| 0317-A9 | Ab | SARS-CoV2 | | | SARS-CoV2 | S; Unk | B-cells; SARS-CoV2 | 72 | EVQLVQSGAEVKKPGASVKVSCKVSGYT | 1154 |
| | | (weak) | | | | | Human Patient | | LTELSMHWVRQAPGKGLEWMGGFDP | |
| | | | | | | | | | EDGETIYAQKFQGRVTMTEDTSTDTAY | |
| | | | | | | | | | MELSSLRSEDTAVYYCATATAMDGYYYY | |
| | | | | | | | | | YGMDVWGQGTTVTVSS | |
| 0317-B1 | Ab | SARS-CoV2 | | | SARS-CoV2 | S; Unk | B-cells; SARS-CoV2 | 73 | EVQLVESGAEVKKPGESLKISCKGSGYSF | 1155 |
| | | (weak) | | | | | Human Patient | | TSYWIGWVRQMPGEGLEWMGIIYPGD | |
| | | | | | | | | | SDTRYSPSFQGQVTISADKSISTAYLQWS | |
| | | | | | | | | | SLKASDTAMYYCASAGSSWYGDAFDIW | |
| | | | | | | | | | GQGTMVTVSS | |
| 0317-C4 | Ab | SARS-CoV2 | | | SARS-CoV2 | S; Unk | B-cells; SARS-CoV2 | 74 | QVQLVQSGAEVKKPGASVKVSCKVSGC | 1156 |
| | | (weak) | | | | | Human Patient | | TLTELSMHWVRQAPGKGLEWMGGFD | |
| | | | | | | | | | PEDGETIYAQKFQGRVTMTEDTSTDTAY | |
| | | | | | | | | | MELSSLRSEDTAVYYCATATIFGVANNW | |
| | | | | | | | | | FDPWGQGTTVTVSS | |

| | | | | | | SEQ | | SEQ | | |
|---|---|---|---|---|---|---|---|---|---|---|
| | | Heavy V | Heavy J | Light V | Light J | ID | | ID | | |
| Name | VL | Gene | Gene | Gene | Gene | NO.: | CDRH3 | NO.: | CDRL3 | Sources |
| 0304-2F8 | EIVMTQSHTLLPVTPGEPASITCRSSQS | IGHV5-51 | IGHJ6 | IGKV2-28 | IGKJ3 | 2057 | ARRGDGLYYY | 3266 | MQALQTP | Xiangyang Chi et al., |
| | LLHSNGYNYLDWYLQKPGQSPQLLIYL | (Human) | (Human) | (Human) | (Human) | | GMDV | | QT | 2020 |
| | GSNRASGVPDRFSGSGSGTDFTLKISR | | | | | | | | | (https://science.science |
| | VEAEDVGVYYCMQALQTPQTFGQGT | | | | | | | | | mag.org/content/early/ |
| | KVDIK | | | | | | | | | 2020/06/19/science.abc |
| | | | | | | | | | | 6952/tab-pdf) |
| 0304-3H3 | DIVMTQSPATLSVSPEERATLSCRASQ | IGHV4-59 | IGHJ2 | IGKV3-15 | IGKJ1 | 2058 | ARDRIAPVGK | 3267 | QQYNKWP | Xiangyang Chi et al., |
| | SVSSNLAWYQQKPGQAPRLLIYGAST | (Human) | (Human) | (Human) | (Human) | | FFGWYFDL | | PWT | 2020 |
| | RATGIPARFSGSGSGTEFTLTISSLQSE | | | | | | | | | (https://science.science |
| | DFAVYYCQQYNKWPPWTFGQGTKV | | | | | | | | | mag.org/content/early/ |
| | DIK | | | | | | | | | 2020/06/19/science.abc |
| | | | | | | | | | | 6952/tab-pdf) |
| 0304-4A10 | EIVLTQSPDSLAVSLGERATINCRSSQS | IGHV3-64 | IGHJ4 | IGKV4-1 | IGKJ3 | 2059 | ARSSSRGFDY | 3268 | QQYYSSPY | Xiangyang Chi et al., |
| | VLYSSNNKNYLAWYQQKPGQPPKVLI | (Human) | (Human) | (Human) | (Human) | | | | A | 2020 |
| | YWASTRESGVPDRFSGSGSGTDFTLTI | | | | | | | | | (https://science.science |
| | SSLQAEDVAVYYCQQYYSSPYAFGPGT | | | | | | | | | mag.org/content/early/ |
| | KVDIK | | | | | | | | | 2020/06/19/science.abc |
| | | | | | | | | | | 6952/tab-pdf) |
| 0304-4A2 | EIVLTQSPDSLAVSLGERATINCKSSQS | IGHV4-39 | IGHJ4 | IGKV4-1 | IGKJ1 | 2060 | ARELFTAVAG | 3269 | HQYYNTPR | Xiangyang Chi et al., |
| | VLYSSNNKNYLAWYQQKPGQPPKLLI | (Human) | (Human) | (Human) | (Human) | | KGGIDY | | T | 2020 |
| | YWASTRESGVPDRFSGSGSGTDFTLTI | | | | | | | | | (https://science.science |
| | SSLQAEDVAVYYCHQYYNTPRTFGQG | | | | | | | | | mag.org/content/early/ |
| | TKVEIK | | | | | | | | | 2020/06/19/science.abc |
| | | | | | | | | | | 6952/tab-pdf) |
| 0304-A1 | DIVMTQSPATLSLSPGERATLSCRASQ | (Human) | IGHJ6 | IGKV3-11 | IGKJ3 | 2061 | AKDFKGGSSS | 3270 | RQRSNWP | Xiangyang Chi et al., |
| | SVSSYLAWYQQKPGQAPRLLIYDASN | IGHV3-30 | (Human) | (Human) | (Human) | | WYTPEIEYG | | PT | 2020 |
| | RATGIPARFSGSGSGADFTLTISSLEPE | | | | | | MDV | | | (https://science.science |
| | DFAVYYCRQRSNWPPTFGGGTKVDIK | | | | | | | | | mag.org/content/early/ |
| | | | | | | | | | | 2020/06/19/science.abc |
| | | | | | | | | | | 6952/tab-pdf) |
| 0317-A2 | DIVMTQSPSSLSASVGDRVTITCRASQ | IGHV7-4- | IGHJ6 | IGKV1-39 | IGKJ3 | 2062 | ARLIRHEAHT | 3271 | QQSYSTPP | 2020/06/19/science.abc |
| | SISSYLNWYQQEPGKAPKLLIYAASSLQ | 1 | (Human) | (Human) | (Human) | | YCSGGSCYSP | | T | Xiangyang Chi et al., |
| | SGVPSRFSGSGSGTDFTLTISSLQPEDF | (Human) | | | | | DYYYGMDV | | | 2020 |
| | ATYYCQQSYSTPPTFGQGTKVDIK | | | | | | | | | (https://science.science |
| | | | | | | | | | | mag.org/content/early/ |
| | | | | | | | | | | 6952/tab-pdf) |
| 0317-A3 | DIQMTHSLILLSASVGDRVTITCRASQS | IGHV3-48 | IGHJ3 | IGKV1-39 | IGKJ1 | 2063 | ASNPPLGEPY | 3272 | QQTYRPP | Xiangyang Chi et al., |
| | ISSYLNWYQQKPGKAPKLLIYAASSLQS | (Human) | (Human) | (Human) | (Human) | | FDI | | WT | 2020 |
| | GVPSRFSGSGSGADFTLTISSLQPEDFA | | | | | | | | | (https://science.science |
| | TYYCQQTYRPPWTFGQGTKVDIK | | | | | | | | | mag.org/content/early/ |
| | | | | | | | | | | 2020/06/19/science.abc |
| | | | | | | | | | | 6952/tab-pdf) |
| 0317-A7 | EIVVTQSLLSLPVTPGEPASISCRSSQSL | IGHV3-30- | IGHJ6 | IGKV2-28 | IGKJ1 | 2064 | ARWGGGMQ | 3273 | MQTLQTP | Xiangyang Chi et al., |
| | LHSNGYNYLDWYLQKPGQSPQVLIYL | 3 | (Human) | (Human) | (Human) | | YLDV | | YT | 2020 |
| | GSNRASGVPDRFSGSGSGTDFTLKISR | (Human) | | | | | | | | (https://science.science |
| | VEAEDVGVYYCMQTLQTPYTFGQGTK | | | | | | | | | mag.org/content/early/ |
| | VEIK | | | | | | | | | 2020/06/19/science.abc |
| | | | | | | | | | | 6952/tab-pdf) |
| 0317-A8 | DIQMTQSPSSLSASVGDRVTITCQASQ | IGHV7-4- | IGHJ4 | IGKV1-33 | IGKJ4 | 2065 | ARAGPNYDF | 3274 | QQYDNLPL | Xiangyang Chi et al., |
| | DISNYLNWYQQKPGKAPKLLIYDASNL | 1 | (Human) | (Human) | (Human) | | WSGYYQTFD | | T | 2020 |
| | ETGVPSRFSGSGSGTDFTFTISSLQPED | (Human) | | | | | Y | | | (https://science.science |
| | IATYYCQQYDNLPLTFGGGTKVEIK | | | | | | | | | mag.org/content/early/ |
| | | | | | | | | | | 2020/06/19/science.abc |
| | | | | | | | | | | 6952/tab-pdf) |
| 0317-A9 | EIVMTQSPLSSPVTLGQPASISCRSSQS | IGHV1-24 | IGHJ6 | IGKV2-24 | IGKJ3 | 2066 | ATATAMDGY | 3275 | MQATQFP | Xiangyang Chi et al., |
| | LVHSDGNTYLSWLQQRPGQPPRLLIY | (Human) | (Human) | (Human) | (Human) | | YYYYGMDV | | YT | 2020 |
| | KISNRFSGVPDRFSGSGAGTDFTLKISR | | | | | | | | | (https://science.science |
| | VEAEDVGVYYCMQATQFPYTFGQGT | | | | | | | | | mag.org/content/early/ |
| | KVDIK | | | | | | | | | 2020/06/19/science.abc |
| | | | | | | | | | | 6952/tab-pdf) |
| 0317-B1 | DIVMTHSLRLLAVSLGERATINCKSSQS | IGHV5-51 | IGHJ3 | IGKV4-1 | IGKJ3 | 2067 | ASAGSSWYG | 3276 | QQYYSTYG | Xiangyang Chi et al., |
| | VLYSSNNKNYLAWYQQKPGQPPKLLI | (Human) | (Human) | (Human) | (Human) | | DAFDI | | S | 2020 |
| | YWASTRESGVPDRFSGSGSGTDFTLTI | | | | | | | | | (https://science.science |
| | SSLQAEDVAVYYCQQYYSTYGSFGGG | | | | | | | | | mag.org/content/early/ |
| | TKVDIK | | | | | | | | | 2020/06/19/science.abc |
| | | | | | | | | | | 6952/tab-pdf) |
| 0317-C4 | QAVVTQPPSVSAAPGQKVTISCSGSSS | IGHV1-24 | IGHJ5 | IGLV1-51 | IGLJ3 | 2068 | ATATIFGVAN | 3277 | GTWDSSLS | Xiangyang Chi et al., |
| | NIGNNYVSWYQQLPGTAPKLLIYDNN | (Human) | (Human) | (Human) | (Human) | | NWFDP | | VVV | 2020 |
| | KRPSGIPDRFSGSKSGTSATLGITGLQT | | | | | | | | | (https://science.science |
| | GDEADYYCGTWDSSLSVVVFGGGTKL | | | | | | | | | mag.org/content/early/ |
| | TVL | | | | | | | | | 2020/06/19/science.abc |
| | | | | | | | | | | 6952/tab-pdf) |

| | | | | | Not | | | | | |
|---|---|---|---|---|---|---|---|---|---|---|
| | Ab | | | Neutral- | Neutral- | | | SEQ | | SEQ |
| | or | | Doesn't | ising | ising | Protein + | | ID | | ID |
| Name | Nb | Binds to | Bind to | Vs | Vs | Epitope | Origin | NO.: | VH or VHH | NO.: |
| 0317-C9 | Ab | SARS-CoV2 | | | SARS-CoV2 | S; S2 | B-cells; SARS-CoV2 | 75 | QVQLVQSGGGVVQPGRSLRLSCAASGF | 1157 |
| | | | | | | | Human Patient | | TFSSYGMHWVRQAPGKGLEWVAVISY | |
| | | | | | | | | | DGSNKYYADSVKGRFTISRDNSKNTLYL | |
| | | | | | | | | | QMNSLRAEDTAVYYCAKDLGYYDILTGQ | |
| | | | | | | | | | LGGYYYYYGMDVWGQGTTVTVSS | |
| 10C10 | Ab | SARS-CoV2 | | | SARS-CoV2 | S; Unk | B-cells; SARS-CoV2 | 76 | QVQLVQSGGGLVQPGGSLRLSCAASGF | 1158 |
| | | | | | | | Human Patient | | TFSSYWMSWVRQAPGKGLEWVANIN | |
| | | | | | | | | | QDGSEKYYVDSVKGRFTISRDNAKNSLY | |
| | | | | | | | | | LQMNSLRAEDTAVYYCARDWDYDILTG | |
| | | | | | | | | | SWFGAFDIWGQGTMVTVSS | |
| 1A09 | Ab | SARS-CoV2 | SARS- | | SARS-CoV2 | S; RBD | Immunised Mouse | 77 | QVQLKESGPGLVAPSQSLSITCTVSGFSL | 1159 |
| | | | CoV1 | | | | | | TSYAISWVRQPPGKGLEWLGVIWTGGG | |
| | | | | | | | | | TNYNSALKSRLSISKDNSKSQVFLKMNSL | |
| | | | | | | | | | QTDDTARYYCARKDYYYGSSYAMDYWG | |
| | | | | | | | | | QGTSVTVSS | |
| 1A10 | Ab | SARS-CoV2 | MERS- | | SARS-CoV2 | S; RBD | Immunised Mouse | 78 | EVQLQQSGAELVRPGASVKLSCKASGYT | 1160 |
| | | | CoV, | | | | | | FSDYYINWVKQRPGQGLEWIARIYPGS | |
| | | | SARS- | | | | | | GNTYYNEKFTGKATLTAEKSSSTAYMQL | |
| | | | CoV1 | | | | | | SSLTSEDSAVYFCARDYGSSYVDYFDYW | |
| | | | | | | | | | GQGTTLTVSS | |
| 1A12 | Ab | SARS-CoV2 | MERS- | SARS-CoV2 | | S; RBD | Immunised Mouse | 79 | EVQLQQSGAELVRPGASVKLSCTASGEN | 1161 |
| | | | CoV, | (weak) | | | | | IKDDYMHWVKQRPEQGLEWIGWINPE | |
| | | | SARS- | | | | | | NGDTEYASKFQGKAAITADTSSNTACLQ | |
| | | | CoV1 | | | | | | LSSLTSEDTAVYYCSTGGYGNYVDAMDY | |
| | | | | | | | | | WGQGTSVTVSS | |
| 1B07 | Ab | SARS-CoV2 | MERS- | SARS-CoV2 | | S; RBD | Immunised Mouse | 80 | QVQLKESGPGLVAPSQSLSITCTVSGFSL | 1162 |
| | | | CoV, | | | | | | TSYAISWVRQPPGKGLEWLGVIWTGGG | |
| | | | SARS- | | | | | | TNYNSALKSRLSISKDNSKSQVFLKMNSL | |
| | | | CoV1 | | | | | | QTDDTARYYCARKDYYGSSSNVMDYW | |
| | | | | | | | | | GQGTSVTVSS | |
| 1B10 | Ab | SARS-CoV2 | MERS- | SARS-CoV2 | | S; RBD | Immunised Mouse | 81 | QVQLKESGPGLVAPSQSLSITCTVSGFSL | 1163 |
| | | | CoV, | | | | | | TNYAINWVRQPPGKGLEWLGVIWTGG | |
| | | | SARS- | | | | | | GTNYNSALRSRLSISKDNSKSQVFLKMN | |
| | | | CoV1 | | | | | | SLHTDDTARYYCARKDYYGSSLAMDYW | |
| | | | | | | | | | GQGTSVTVSS | |
| 1C05 | Ab | SARS-CoV1, | MERS- | SARS-CoV2 | | S; RBD | Immunised Mouse | 82 | EVQLQQSGPELVKPGASVKISCKASGYS | 1164 |
| | | SARS-CoV2 | CoV | (weak) | | | | | FTDYYMNWVKQSPEKSLEWIGEINPST | |
| | | | | | | | | | GGPTYNQKFKAKATVTVDKSSSTAYMQ | |
| | | | | | | | | | LKSLTSEDSAVYYCARRNYDLYYYAMIDY | |
| | | | | | | | | | WGQGTSVTVSS | |
| 1C06 | Ab | SARS-CoV2 | MERS- | | SARS-CoV2 | S; RBD | Immunised Mouse | 83 | EVQLQQSGAELAKPGASVKLSCKASGYT | 1165 |
| | | | CoV, | | | | | | FTNYWMHWVKQRPGQGLEWIGYINPS | |
| | | | SARS- | | | | | | SGYTKFNQKFNDKATLTADKSSTTAYMQ | |
| | | | CoV1 | | | | | | LSSPTYEDSAVYYCARSDYYGSSYVGYA | |
| | | | | | | | | | MDYWGQGTSVTVSS | |
| 1C07 | Ab | SARS-CoV1, | MERS- | | SARS-CoV2 | S; RBD | Immunised Mouse | 84 | EVQLQQPGPELVKPGASVKISCKASGYS | 1166 |
| | | SARS-CoV2 | CoV | | | | | | FTDYYMNWVKQSPEKSLEWIGEINPST | |
| | | | | | | | | | GGTSYNQKFKGKATLTVDKSSSTAYMQL | |
| | | | | | | | | | KSLTSEDSAVYYCARRNYDLYYYAMDYW | |
| | | | | | | | | | GQGTSVTVSS | |
| 1D04 | Ab | SARS-CoV2 | MERS- | | SARS-CoV2 | S; RBD | Immunised Mouse | 85 | EVQLQQSGAELVRPGASVKLSCTASGEN | 1167 |
| | | | CoV, | | | | | | IKDDYMHWVKQRPEQGLEWIGWINPE | |
| | | | SARS- | | | | | | NGDTEYASKFQGKAAITADTSSNTACLQ | |
| | | | CoV1 | | | | | | LSSLTSEDTAVYYCSTGGYGNYVDAMDY | |
| | | | | | | | | | WGQGTSVTVSS | |
| 1D05 | Ab | SARS-CoV2 | MERS- | | SARS-CoV2 | S; RBD | Immunised Mouse | 86 | QVQLKESGPGLVAPSQSLSITCTVSGFSL | 1168 |
| | | | CoV, | | | | | | TSYAISWVRQPPGKGLEWLGVIWTGGG | |
| | | | SARS- | | | | | | TNYNSALKSRLSISKDNSKSQVFLKMNSL | |
| | | | CoV1 | | | | | | QTDDTARYYCARKDYYGSSSNVMDYW | |
| | | | | | | | | | GQGTSVTVSS | |

| | | | | | | SEQ | | SEQ | | |
|---|---|---|---|---|---|---|---|---|---|---|
| | | Heavy V | Heavy J | Light V | Light J | ID | | ID | | |
| Name | VL | Gene | Gene | Gene | Gene | NO.: | CDRH3 | NO.: | CDRL3 | Sources |
| 0317-C9 | QAVVTQPPSASGTPGQRVTISCSGSSS | IGHV3-30 | IGHJ6 | IGLV1-44 | IGLJ3 | 2069 | AKDLGYYDILT | 3278 | AAWDDSL | Xiangyang Chi et al., |
| | NIGSNTVNWYQQLPGTAPKLLIYSNN | (Human) | (Human) | (Human) | (Human) | | GQLGGYYYYY | | NGVV | 2020 |
| | QRPSGVPDRFSGSKSGTSASLAISGLQ | | | | | | GMDV | | | (https://science.science |
| | SEDEADYYCAAWDDSLNGVVFGGGT | | | | | | | | | mag.org/content/early/ |
| | KLTVL | | | | | | | | | 2020/06/19/science.abc |
| | | | | | | | | | | 6952/tab-pdf) |
| 10C10 | DIQLTQSPSSLSASVRNRVTITCRASQG | IGHV3-7 | IGHJ3 | IGKV1-17 | IGKJ4 | 2070 | ARDWDYDILT | 3279 | LQHNNYPL | Xiangyang Chi et al., |
| | IKNDLCWYQQKPGKAPKRLIYAASSLQ | (Human) | (Human) | (Human) | (Human) | | GSWFGAFDI | | T | 2020 |
| | SGVPSRFSGSGSGTEFTLTISSLQPEDF | | | | | | | | | (https://science.science |
| | ATYYCLQHNNYPLTFGGGTNEEIK | | | | | | | | | mag.org/content/early/ |
| | | | | | | | | | | 2020/06/19/science.abc |
| | | | | | | | | | | 6952/tab-pdf) |
| 1A09 | QAVVTQESALTTSPGETVTLTCRSSTG | IGHV2-9- | IGHJ4 | IGLV1 | IGLJ1 | 2071 | ARKDYYYGSS | 3280 | ALWYSNH | Wafaa Alsoussi et al., |
| | AVTTSNYANWVQEKPDHLFTGLIGGT | 1 | (Mouse) | (Mouse) | (Mouse) | | YAMDY | | WV | 2020 |
| | NNRAPGVPARFSGSLIGDKAALTITGA | (Mouse) | | | | | | | | (https://www.jimmunol |
| | QTEDEAIYFCALWYSNHWVFGGGTKL | | | | | | | | | .org/content/early/202 |
| | TVL | | | | | | | | | 0/06/23/jimmunol.2000 |
| | | | | | | | | | | 583) |
| 1A10 | DIQMTQSPSSLSASLGDRVTISCRASQ | IGHV1-76 | IGHJ2 | IGKV10-96 | IGKJ2 | 2072 | ARDYGSSYVD | 3281 | QQGNTLP | Wafaa Alsoussi et al., |
| | DISNYLNWYQQKPDGTVKLLIFYTSRL | (Mouse) | (Mouse) | (Mouse) | (Mouse) | | YFDY | | YT | 2020 |
| | HSGVPSRFSGSGSGTDYSLTISNLEQE | | | | | | | | | (https://www.jimmuno |
| | DIATYFCQQGNTLPYTFGGGTKLEIK | | | | | | | | | org/content/early/202 |
| | | | | | | | | | | 0/06/23/jimmunol.2000 |
| | | | | | | | | | | 583) |
| 1A12 | DIKMTQSPSSMYASLGERVTITCKASQ | IGHV14-4 | IGHJ4 | IGKV14- | IGKJ1 | 2073 | STGGYGNYV | 3282 | LQYDEFRT | Wafaa Alsoussi et al., |
| | DINSFLSWFQQKPGKSPKTLIYRANRL | (Mouse) | (Mouse) | 111 | (Mouse) | | DAMDY | | | 2020 |
| | VDGVPSRFSGSGSGQDYSLTISSLDYE | | | (Mouse) | | | | | | (https://www.jimmunol |
| | DMGIYYCLQYDEFRTFGGGTKLEIK | | | | | | | | | .org/content/early/202 |
| | | | | | | | | | | 0/06/23/jimmunol.2000 |
| | | | | | | | | | | 583) |
| 1B07 | QAVVTQESALTTSPGETVTLTCRSSTG | IGHV2-9- | IGHJ4 | IGLV1 | IGLJ3 | 2074 | ARKDYYGSSS | 3283 | ALWYSNQ | Wafaa Alsoussi et al., |
| | AVTTSNYANWVQEKPDHLITGLIGGT | 1 | (Mouse) | (Mouse) | (Mouse) | | NVMDY | | F | 2020 |
| | NNRVPGVPARFSGSLIGDKAALTITGA | (Mouse) | | | | | | | | (https://www.jimmunol |
| | QTEDEAIYFCALWYSNQFIFGSGTKVT | | | | | | | | | .org/content/early/202 |
| | VL | | | | | | | | | 0/06/23/jimmunol.2000 |
| | | | | | | | | | | 583) |
| 1B10 | QAVVTQESALTTSPGETVTLTCRSSTG | IGHV2-9- | IGHJ4 | IGLV1 | IGLJ1 | 2075 | ARKDYYGSSL | 3284 | ALWYSNH | Wafaa Alsoussi et al., |
| | AVTTSNYANWVQEKPDHLFTGLIGGT | (Mouse) | (Mouse) | (Mouse) | (Mouse) | | AMDY | | WV | 2020 |
| | NNRAPGVPARFSGSLIGDKAALTITGA | | | | | | | | | (https://www.jimmunol |
| | QTEDEAIYFCALWYSNHWVFGGGTKL | | | | | | | | | .org/content/early/202 |
| | TVL | | | | | | | | | 0/06/23/jimmunol.2000 |
| | | | | | | | | | | 583) |
| 1C05 | DIVLTQSPASLAVSLGQRATISCRASES | IGHV1-42 | IGHJ4 | IGKV3-10 | IGKJ5 | 2076 | ARRNYDLYYY | 3285 | QQNNEDP | Wafaa Alsoussi et al., |
| | VDSYGTSFMHWYQQKPGQPPKLLIYL | (Mouse) | (Mouse) | (Mouse) | (Mouse) | | AMDY | | LT | 2020 |
| | ASNLESGVPARFSGSGSRTDFTLTIDPV | | | | | | | | | (https://www.jimmunol |
| | EADDAATYYCQQNNEDPLTFGAGTKL | | | | | | | | | .org/content/early/202 |
| | ELK | | | | | | | | | 0/06/23/jimmunol.2000 |
| | | | | | | | | | | 583) |
| 1C06 | DVVMTQTPLSLPVSLGDQASISCRSSQ | IGHV1-7 | IGHJ4 | IGKV1-117 | IGKJ1 | 2077 | ARSDYYGSSY | 3286 | FQGSHVPP | Wafaa Alsoussi et al., |
| | SIVHSNGNTYLEWYLQKPGQSPKLLIY | (Mouse) | (Mouse) | (Mouse) | (Mouse) | | VGYAMDY | | T | 2020 |
| | KVSNRFSGVPDRFSGSGSGTDFTLKIS | | | | | | | | | (https://www.jimmunol |
| | RVEAEDLGVYYCFQGSHVPPTFGGGT | | | | | | | | | .org/content/early/202 |
| | KLEIK | | | | | | | | | 0/06/23/jimmunol.2000 |
| | | | | | | | | | | 583) |
| 1C07 | DIVLTQSPASLAVSLGQRATISCRASEG | IGHV1-42 | IGHJ4 | IGKV3-10 | IGKJ5 | 2078 | ARRNYDLYYY | 3287 | QQNNEDP | Wafaa Alsoussi et al., |
| | VDSYGSSFMHWYQQKPGQPPKLLIYL | (Mouse) | (Mouse) | (Mouse) | (Mouse) | | AMDY | | LT | 2020 |
| | ASNLESGVPARFSGSGSGTDFTLTIDP | | | | | | | | | (https://www.jimmunol |
| | VEADDAATYYCQQNNEDPLTFGAGTK | | | | | | | | | .org/content/early/202 |
| | LELK | | | | | | | | | 0/06/23/jimmunol.2000 |
| | | | | | | | | | | 583) |
| 1D04 | DIKMITQSPSSMYASLGERVTITCKASQ | IGHV14-4 | IGHJ4 | IGKV14- | IGKJ1 | 2079 | STGGYGNYV | 3288 | LQYDEFRT | Wafaa Alsoussi et al., |
| | DINSFLSWFQQKPGKSPKTLIYRANRL | (Mouse) | (Mouse) | 111 | (Mouse) | | DAMDY | | | 2020 |
| | VDGVPSRFSGSGSGQDYSLTISSLEYED | | | (Mouse) | | | | | | (https://www.jimmunol |
| | MGIYYCLQYDEFRTFGGGTKLEIK | | | | | | | | | .org/content/early/202 |
| | | | | | | | | | | 0/06/23/jimmunol.2000 |
| | | | | | | | | | | 583) |
| 1D05 | QAVVTQESALTTSPGETVTLTCRSSTG | IGHV2-9- | IGHJ4 | IGLV1 | IGLJ3 | 2080 | ARKDYYGSSS | 3289 | ALWYSNQ | Wafaa Alsoussi et al., |
| | AVTTSNYANWVQEKPDHLITGLIGGT | 1 | (Mouse) | (Mouse) | (Mouse) | | NVMDY | | FI | 2020 |
| | NNRVPGVPARFSGSLIGDKAALTITGA | (Mouse) | | | | | | | | (https://www.jimmunol |
| | QTEDKAIYFCALWYSNQFIFGSGTKVT | | | | | | | | | .org/content/early/202 |
| | VL | | | | | | | | | 0/06/23/jimmunol.2000 |
| | | | | | | | | | | 583) |

| | | | | | Not | | | | | |
|---|---|---|---|---|---|---|---|---|---|---|
| | Ab | | | Neutral- | Neutral- | | | SEQ | | SEQ |
| | or | | Doesn't | ising | ising | Protein + | | ID | | ID |
| Name | Nb | Binds to | Bind to | Vs | Vs | Epitope | Origin | NO.: | VH or VHH | NO.: |
| 1E02 | Ab | SARS-CoV2 | MERS- | | SARS-CoV2 | S; RBD | Immunised Mouse | 87 | EVQLQQPGPELVKPGASVKISCKASGYS | 1169 |
| | | | CoV, | | | | | | FTDYYMNWVKQSPEKSLEWIGEINPST | |
| | | | SARS- | | | | | | GGTSYNQKFKGKATLTVDKSSSTAYMQL | |
| | | | CoV1 | | | | | | KSLTSEDSAVYYCSRRNYDLYYYAMDYW | |
| | | | | | | | | | GQGTSVTVSS | |
| 1E07 | Ab | SARS-CoV2 | MERS- | SARS-CoV2 | | S; RBD | Immunised Mouse | 88 | EVQLQQSGPELVKPGASVKISCKASGYS | 1170 |
| | | | CoV, | | | | | | FTGYSMNWVKKSPEKSLEWIGEINPSTG | |
| | | | SARS- | | | | | | GTTYNQKFKAKATLTVDKSSSTAYIQLKS | |
| | | | CoV1 | | | | | | LTSEDSAVYYCARGAGAYWGQGTLVTV | |
| | | | | | | | | | SA | |
| 1E10 | Ab | SARS-CoV2 | MERS- | | SARS-CoV2 | S; RBD | Immunised Mouse | 89 | EVQLQQSGPELVKPGASVKISCKASGYA | 1171 |
| | | | CoV, | | | | | | FSSSWMNWVKQRPGKGLEWIGRIYPG | |
| | | | SARS- | | | | | | DGDTNYNGKFKGKATLTADKSSSTAYM | |
| | | | CoV1 | | | | | | QLSSLTSEDSAVYFCARDHGPAWFAYRG | |
| | | | | | | | | | QGTLVTVSA | |
| 1H06 | Ab | SARS-CoV2 | MERS- | | SARS-CoV2 | S; RBD | Immunised Mouse | 90 | EVQLQQSGPELVKPGASVKISCKASGYS | 1172 |
| | | | CoV, | | | | | | FTGYSMNWVKKSPEKSLEWIGEINPSTG | |
| | | | SARS- | | | | | | GTTYNQKFKAKATLTVDKSSSTAYIQLKS | |
| | | | CoV1 | | | | | | LTSEDSAVYYCARGAGAYWGQGTLVTV | |
| | | | | | | | | | SA | |
| 1H10 | Ab | SARS-CoV2 | MERS- | SARS-CoV2 | | S; RBD | Immunised Mouse | 91 | QVQLKESGPGLVAPSQSLSITCTVSGFSL | 1173 |
| | | | CoV, | (weak) | | | | | TNYAISWVRQPPGKGLEWLGVIWTGG | |
| | | | SARS- | | | | | | GTNYNSALKSRLSISKDNSKSQVFLKMN | |
| | | | CoV1 | | | | | | SLQTDDTARYYCARISYYDYEGVDYWGQ | |
| | | | | | | | | | GTTLTVSS | |
| 1M-1D2 | Ab | SARS-CoV2 | | SARS-CoV2 | | S; RBD | B-cells; SARS-CoV2 | 92 | QVQLVESGGGLVQPGGSLRLSCAASGF | 1174 |
| | | | | | | | Human Patient | | TFSSYAMHWVRQAPGKGLEYVSAISGN | |
| | | | | | | | | | GGSTYYAKSVKGRFTISRDNSKNTLYLQ | |
| | | | | | | | | | MGSLRAEDMAVYYCARGAEYYDFWSG | |
| | | | | | | | | | YYSAYFDYWGQGTLVTVSS | |
| 2B04 | Ab | SARS-CoV2 | MERS- | SARS-CoV2 | | S; RBD | Immunised Mouse | 93 | QVQLKQSGPGLVAPSQSLSITCTVSGFSL | 1175 |
| | | | CoV, | | | | | | INYAISWVRQPPGKGLEWLGVIWTGGG | |
| | | | SARS- | | | | | | TNYNSALKSRLSISKDNSKSQVFLKMNSL | |
| | | | CoV1 | | | | | | QTDDTARYYCARKDYYGRYYGMDYWG | |
| | | | | | | | | | QGTSVTVSS | |
| 2C02 | Ab | SARS-CoV1, | MERS- | | SARS-CoV2 | S; RBD | Immunised Mouse | 94 | EVQLQQPGAELVKPGASVKVSCKASGYI | 1176 |
| | | SARS-CoV2 | CoV | | | | | | FTNYWMHWVKQRPGQGLEWIGRIHPS | |
| | | | | | | | | | DSDTKYNQKFKGKATLTVDKSSSTAYMQ | |
| | | | | | | | | | LSSLTSEDSAVYYCAILDSYWYFDVWGT | |
| | | | | | | | | | GTTVTVSS | |
| 2C03 | Ab | SARS-CoV2 | MERS- | SARS-CoV2 | | S; RBD | Immunised Mouse | 95 | EVQLQQSGPELVKPGASVKISCKASGYA | 1177 |
| | | | CoV, | (weak) | | | | | FSSSWMNWVKQRPGKGLEWIGRIYPG | |
| | | | SARS- | | | | | | DGDTNYNGKLKGKATLTADKSSSTAYM | |
| | | | CoV1 | | | | | | QLSSLTSEDSAVYFCARKSYGYWHFDV | |
| | | | | | | | | | WGTGTTVTVSS | |
| 2C04 | Ab | SARS-CoV2 | MERS- | | SARS-CoV2 | S; RBD | Immunised Mouse | 96 | EVQLQQPGPELVKPGTSVKISCKASGYT | 1178 |
| | | | CoV, | | | | | | FTDYYMNWVKQSHGKSLEWIGDINPN | |
| | | | SARS- | | | | | | NGGTNYNQKFKGKATLTVDKSSSTAYM | |
| | | | CoV1 | | | | | | ELRSLTSEDSAVCYCAAGKGDYWGQGT | |
| | | | | | | | | | TLTVSS | |
| 2D01 | Ab | SARS-CoV2 | MERS- | | SARS-CoV2 | S; RBD | Immunised Mouse | 97 | EVQLQQPGAELVKPGASVKVSCKASGYI | 1179 |
| | | | CoV, | | | | | | FTNYWMHWVKQRPGQGLEWIGRIHPS | |
| | | | SARS- | | | | | | DSDTKYNQKFKGKATLTVDKSSSTAYMQ | |
| | | | CoV1 | | | | | | LSSLTSEDSAVYYCAILDSYWYFDVWGT | |
| | | | | | | | | | GTTVTVSS | |
| 2D08 | Ab | SARS-CoV2 | MERS- | SARS-CoV2 | | S; RBD | Immunised Mouse | 98 | EVQLQQSGPELVKPGTSVKISCKASGYTF | 1180 |
| | | | CoV, | (weak) | | | | | TDYYMNWVKQSHGKSLEWIGDINPNN | |
| | | | SARS- | | | | | | GGTNYNQKFKGKATLTVDKSSSTAYMEL | |
| | | | CoV1 | | | | | | RSLTSEDSAVYYCAAGKGDYWGQGTTL | |
| | | | | | | | | | TVSS | |

| | | | | | | SEQ | | SEQ | | |
|---|---|---|---|---|---|---|---|---|---|---|
| | | Heavy V | Heavy J | Light V | Light J | ID | | ID | | |
| Name | VL | Gene | Gene | Gene | Gene | NO.: | CDRH3 | NO.: | CDRL3 | Sources |
| 1E02 | DIVLTQSPASLAVSLGQRATISCRASEG | IGHV1-42 | IGHJ4 | IGKV3-10 | IGKJ5 | 2081 | SRRNYDLYYY | 3290 | QQNNEDP | Wafaa Alsoussi et al., |
| | VDSYGSSFMHWYQQKPGQAPKLLIYL | (Mouse) | (Mouse) | (Mouse) | (Mouse) | | AMDY | | LT | 2020 |
| | ASNLESGVPARFSGSGSRTDFTLTIDPV | | | | | | | | | (https://www.jimmunol |
| | EADDAAIYYCQQNNEDPLTFGAGTKL | | | | | | | | | org/content/early/202 |
| | EIK | | | | | | | | | 0/06/23/jimmunol.2000 |
| | | | | | | | | | | 583) |
| 1E07 | DIVLTQSPASLAVSLGQRATISCRASES | IGHV1-42 | IGHJ3 | IGKV3-1 | IGKJ1 | 2082 | ARGAGAY | 3291 | QQSRKVP | Wafaa Alsoussi et al., |
| | VEYYGTSLMQWFQQKPGQPPKLLIFA | (Mouse) | (Mouse) | (Mouse) | (Mouse) | | | | WT | 2020 |
| | ASNVESGVPARFGGSGSGTDFSLNIHP | | | | | | | | | (https://www.jimmunol |
| | VEEDDIAMYFCQQSRKVPWTFGGGT | | | | | | | | | .org/content/early/202 |
| | KLEIK | | | | | | | | | 0/06/23/jimmunol.2000 |
| | | | | | | | | | | 583) |
| 1E10 | QIVLTQSPAIMSASPGEKVTMTCSASS | IGHV1-82 | IGHJ3 | IGKV4-59 | IGKJ2 | 2083 | ARDHGPA | 3292 | QQWSSNP | Wafaa Alsoussi et al., |
| | SVSYMHWYQQKSGTSPKRWIYDTSKL | (Mouse) | (Mouse) | (Mouse) | (Mouse) | | | | PT | 2020 |
| | ASGVPARFSGSGSGTSYSLTISSMEAE | | | | | | | | | (https://www.jimmunol |
| | DAATYYCQQWSSNPPTFGSGTKLEIK | | | | | | | | | .org/content/early/202 |
| | | | | | | | | | | 0/06/23/jimmunol.2000 |
| | | | | | | | | | | 583)) |
| 1H06 | DIVLTQSPASLAVSLGQRATISCRASES | IGHV1-42 | IGHJ3 | IGKV3-1 | IGKJ1 | 2084 | ARGAGAY | 3293 | QQSRKVP | Wafaa Alsoussi et al., |
| | VEYYGTSLMQWFQQKPGQPPKLLIFA | (Mouse) | (Mouse) | (Mouse) | (Mouse) | | | | WT | 2020 |
| | ASNVESGVPARFGGSGSGTDFSLNIHP | | | | | | | | | (https://www.jimmunol |
| | VEEDDIATYFCQQSRKVPWTFGGGTK | | | | | | | | | .org/content/early/202 |
| | LEIK | | | | | | | | | 0/06/23/jimmunol.2000 |
| | | | | | | | | | | 583 |
| 1H10 | QAVVTQESALTTSPGETVTLTCRSSTG | IGHV2-9- | IGHJ2 | IGLV1 | IGLJ1 | 2085 | ARISYYDYEG | 3294 | ALWYSNH | Wafaa Alsoussi et al., |
| | AVTTSNYANWVQEKPDHLFTGLIGGT | 1 | (Mouse) | (Mouse) | (Mouse) | | VDY | | WV | 2020 |
| | NNRAPGVPARFSGSLIGDKAALTITGA | (Mouse) | | | | | | | | (https://www.jimmunol |
| | QTEDEAIYFCALWYSNHWVFGGGTKL | | | | | | | | | .org/content/early/202 |
| | TVL | | | | | | | | | 0/06/23/jimmunol.2000 |
| | | | | | | | | | | 583) |
| 1M-1D2 | QAVVTQPPSASGTPGQRVTISCSGSSS | IGHV3-64 | IGHJ4 | IGLV1-47 | IGLJ3 | 2086 | ARGAEYYDF | 3295 | AAWDDSLI | Xiangyang Chi et al., |
| | NIGSNYVYWYQQLPGTAPKLLIYNNN | (Human) | (Human) | (Human) | (Human) | | WSGYYSAYFD | | YVL | 2020 |
| | QRPSGVPDRFSGSKSGTSASLAISGLRS | | | | | | Y | | | (https://science.science |
| | EDEADYYCAAWDDSLIYVLFGGGTKLT | | | | | | | | | mag.org/content/early/ |
| | VL | | | | | | | | | 2020/06/19/science.abc |
| | | | | | | | | | | 6952/tab-pdf) |
| 2B04 | QAVVTQESALTTSPGETVTLTCRSSTG | IGHV2-9- | IGHJ4 | IGLV1 | IGLJ1 | 2087 | ARKDYYGRYY | 3296 | ALWYNNH | Wafaa Alsoussi et al., |
| | AVTTSNYANWVQEKPDHLFTGLIGGT | 1 | (Mouse) | (Mouse) | (Mouse) | | GMDY | | WV | 2020 |
| | NNRAPGVPARFSGSLIGDKAALTITGA | (Mouse) | | | | | | | | (https://www.jimmunol |
| | QTEDEAIYFCALWYNNHWVFGGGTK | | | | | | | | | .org/content/early/202 |
| | LTVL | | | | | | | | | 0/06/23/jimmunol.2000 |
| | | | | | | | | | | 583) |
| 2C02 | QIVLTQSPAIMSASPGEKVTMTCSASS | IGHV1-74 | IGHJ1 | IGKV4-55 | IGKJ5 | 2088 | AILDSYWYFD | 3297 | QQWSSYP | Wafaa Alsoussi et al., |
| | SVSYMYWYQQKPGSSPRLLIYDTSNLA | (Mouse) | (Mouse) | (Mouse) | (Mouse) | | V | | LT | 2020 |
| | SGVPIRFSGSGSGTSYSLTISRMEAEDA | | | | | | | | | (https://www.jimmunol |
| | ATYYCQQWSSYPLTFGAGTKLELK | | | | | | | | | org/content/early/202 |
| | | | | | | | | | | 0/06/23/jimmunol.2000 |
| | | | | | | | | | | 583) |
| 2C03 | DVVMTQTPLSLPVSLGDQASISCRSSQ | IGHV1-82 | IGHJ1 | IGKV1-117 | IGKJ2 | 2089 | ARKSYGYWH | 3298 | FQGSHVPY | Wafaa Alsoussi et al., |
| | SIVYSNGNTYLEWYLQKPGQSPKLLIYK | (Mouse) | (Mouse) | (Mouse) | (Mouse) | | DV | | T | 2020 |
| | VSNRFSGVPDRFSGSGSGTDFTLKISG | | | | | | | | | (https://www.jimmunol |
| | VEAEDLGVYYCFQGSHVPYTFGGGTK | | | | | | | | | org/content/early/202 |
| | LEIK | | | | | | | | | 0/06/23/jimmunol.2000 |
| | | | | | | | | | | 583) |
| 2C04 | DIVLTQSQASLAVSLGQRATISCRASES | IGHV1-26 | IGHJ2 | IGKV3-1 | IGKJ1 | 2090 | AAGKGDY | 3299 | QQSRKVP | Wafaa Alsoussi et al., |
| | VEYYGTSLMQWYQQKPGQPPKLLIYA | (Mouse) | (Mouse) | (Mouse) | (Mouse) | | | | WT | 2020 |
| | ASNVESGVPARFSGSGSGTDFSLNIHP | | | | | | | | | (https://www.jimmunol |
| | VEEDDIAMYFCQQSRKVPWTFGGGT | | | | | | | | | .org/content/early/202 |
| | KLEIK | | | | | | | | | 0/06/23/jimmunol.2000 |
| | | | | | | | | | | 583) |
| 2D01 | QIVLTQSPAIMSASPGEKVTMTCSASS | IGHV1-74 | IGHJ1 | IGKV4-55 | IGKJ5 | 2091 | AILDSYWYFD | 3300 | QQWSSYP | Wafaa Alsoussi et al., |
| | SVSYMYWYQQKPGSSPRLLIYDTSNLA | (Mouse) | (Mouse) | (Mouse) | (Mouse) | | V | | LT | 2020 |
| | SGVPIRFSGSGSGTSYSLTISRMEAEDA | | | | | | | | | (https://www.jimmunol |
| | ATYYCQQWSSYPLTFGAGTKLELK | | | | | | | | | .org/content/early/202 |
| | | | | | | | | | | 0/06/23/jimmunol.2000 |
| | | | | | | | | | | 583) |
| 2D08 | DIVLTQSQASLAVSLGQRATISCRASES | IGHV1-26 | IGHJ2 | IGKV3-1 | IGKJ1 | 2092 | AAGKGDY | 3301 | QQSRKVP | Wafaa Alsoussi et al., |
| | VEYYGTSLMQWYQQKPGQPPKLLIYA | (Mouse) | (Mouse) | (Mouse) | (Mouse) | | | | WT | 2020 |
| | ASNVESGVPARFSGSGSGTDFSLNIHP | | | | | | | | | (https://www.jimmunol |
| | VEEDDIAMYFCQQSRKVPWTFGGGT | | | | | | | | | .org/content/early/202 |
| | KLEIK | | | | | | | | | 0/06/23/jimmunol.2000 |
| | | | | | | | | | | 583) |

| | | | | | Not | | | | | |
|---|---|---|---|---|---|---|---|---|---|---|
| | Ab | | | Neutral- | Neutral- | | | SEQ | | SEQ |
| | or | | Doesn't | ising | ising | Protein + | | ID | | ID |
| Name | Nb | Binds to | Bind to | Vs | Vs | Epitope | Origin | NO.: | VH or VHH | NO.: |
| 2D11 | Ab | SARS-CoV2 | MERS- | | SARS-CoV2 | S; RBD | Immunised Mouse | 99 | EVQLQQSGPELVKPGASVKISCKASGYT | 1181 |
| | | | CoV, | | | | | | FTDYYMNWVKQSHGKSLEWIGDINPN | |
| | | | SARS- | | | | | | NGGTSYNQKFKGKATLTVDKSSSTAYME | |
| | | | CoV1 | | | | | | LRSLTSEDSAVYYCARKGDGYYGGFAYW | |
| | | | | | | | | | GQGTLVTVSA | |
| 2E06 | Ab | SARS-CoV1, | MERS- | SARS-CoV2 | | S; RBD | Immunised Mouse | 100 | EVQLQQSVADLVRPGASVKLSCTASGEN | 1182 |
| | | SARS-CoV2 | CoV | (weak) | | | | | IKNTYMHWVKQRPEQGLEWIGRIDPTN | |
| | | | | | | | | | GDTKYVSKFQGKATITADTSSNTAYLQLS | |
| | | | | | | | | | SLTSEDTAIYYCATYGSYYLYYYAMNYWG | |
| | | | | | | | | | QGTSVTVSS | |
| 2E10 | Ab | SARS-CoV1, | MERS- | | SARS-CoV2 | S; RBD | Immunised Mouse | 101 | EVQLQQPGAELVRPGASVKLSCKASGYT | 1183 |
| | | SARS-CoV2 | CoV | | | | | | FTDYYINWVKQRPGQGLEWIARIYPGT | |
| | | | | | | | | | GTTYYNEKFKGKATLTAEKSSSTAYMQLS | |
| | | | | | | | | | SLTSEDSAVYFCARYDGNLYYYAMDYW | |
| | | | | | | | | | GQGTSVTVSS | |
| 2F04 | Ab | SARS-CoV2 | MERS- | | SARS-CoV2 | S; RBD | Immunised Mouse | 102 | EVQLQQPGAELVKPGASVKMSCKASGY | 1184 |
| | | | CoV, | | | | | | TFTSYWITWVKQRPGQGLEWIGDIYPG | |
| | | | SARS- | | | | | | SGSTKYNEKFRSEATLTVDTSSTTAYMQL | |
| | | | CoV1 | | | | | | SSLTSEDSAVYYCARWDFYGSRTFDYWG | |
| | | | | | | | | | QGTTLTVSS | |
| 2H04 | Ab | SARS-CoV2 | MERS- | SARS-CoV2 | | S; RBD | Immunised Mouse | 103 | EVQLQQSGAELVKPGASVKMSCKASGY | 1185 |
| | | | CoV, | | | | | | TFTSYWITWVKQRPGQGLEWIGDIYPG | |
| | | | SARS- | | | | | | SGSTKYNEKFRSEATLTVDTSSTTAYMQL | |
| | | | CoV1 | | | | | | SSLTSEDSAVYYCARWDFYGSRTFDYWG | |
| | | | | | | | | | QGTTLTVSS | |
| 2M- | Ab | SARS-CoV2 | | | SARS-CoV2 | S; RBD | B-cells; SARS-CoV2 | 104 | EVQLVESGGGLVQPGGSLRLSCAASGFT | 1186 |
| 10B11 | | | | | | | Human Patient | | VSSNYMSWVRQAPGKGLEWVSVIYSG | |
| | | | | | | | | | GSTYYADSVKGRFTISRDNSKNTLYLQM | |
| | | | | | | | | | NSLRAEDTAVYYCARATWLRGVMDVW | |
| | | | | | | | | | GQGTTVTVSS | |
| 2M-12D7 | Ab | SARS-CoV2 | | | SARS-CoV2 | S; S2 | B-cells; SARS-CoV2 | 105 | EVQLVESGGGLVQPGRSLRLSCAASGFT | 1187 |
| | | | | | | | Human Patient | | FDDYVMHWVRQAPGKGLEWVSGINW | |
| | | | | | | | | | NSGSIGYADSVKGRFTISRDNAKNSLYLQ | |
| | | | | | | | | | MNSLRAEDTALYYCAKDVRYCSSTSCYFS | |
| | | | | | | | | | AFDIWGQGTMVTVSS | |
| 2M-13A3 | Ab | SARS-CoV2 | | | SARS-CoV2 | S; S2 | B-cells; SARS-CoV2 | 106 | EVQLVESGGGVVQPGRSLRLSCAASGFT | 1188 |
| | | | | | | | Human Patient | | FSGYAMHWVRQAPGKGLEWVAVISYD | |
| | | | | | | | | | GSNKYYADSVKGRFTISRDNSKNTLYLQ | |
| | | | | | | | | | MNSLRAEDTAVYYCARGGGSYYYWFDP | |
| | | | | | | | | | WGQGTMVTVSS | |
| 2M- | Ab | SARS-CoV2 | | | SARS-CoV2 | S; S2 | B-cells; SARS-CoV2 | 107 | EVQLVQWGAGLLKPSETLSLTCAVYGGS | 1189 |
| 13D11 | | | | | | | Human Patient | | FSGYYWSWIRQPPGKGLEWIGEINHSG | |
| | | | | | | | | | STNYNPSLKSRVTISVDTSKNQFSLKLSSV | |
| | | | | | | | | | TAADTAVYYCARAGYSSSWYGVRGVDP | |
| | | | | | | | | | WGQGTMVTVSS | |
| 2M-14B2 | Ab | SARS-CoV2 | | | SARS-CoV2 | S; S2 | B-cells; SARS-CoV2 | 108 | QVQLLQSGGGVVQPGRSLRLSCAASGF | 1190 |
| | | | | | | | Human Patient | | TFSTYGMHWVRQAPGKGLEWVAVISY | |
| | | | | | | | | | DGSNKYYADSVKGRFTISRDNSKNTLYL | |
| | | | | | | | | | QMNSLRAEDTAVYYCAKGSDIVVVPVG | |
| | | | | | | | | | NWFDPWGQGTLVTVSS | |
| 2M-14E4 | Ab | SARS-CoV2 | | | SARS-CoV2 | S; S2 | B-cells; SARS-CoV2 | 109 | QVQLQESGPGLVKPSETLSLACTVSGGS | 1191 |
| | | | | | | | Human Patient | | VSSDNSYWSWIRQPPGKGLEWIGYTFH | |
| | | | | | | | | | SGSANYNPSLKSRVTISVDTSKNQFSLKL | |
| | | | | | | | | | SSVTAADTAVYYCARVQRYYPDSSGFYG | |
| | | | | | | | | | RRFDIWGQGTLVTVSS | |
| 2M-14E5 | Ab | SARS-CoV2 | | | SARS-CoV2 | S; S2 | B-cells; SARS-CoV2 | 110 | EVQLVESGGGVVQPGRSLRLSCAASGFT | 1192 |
| | | | | | | | Human Patient | | FSTYSMHWVRQAPGKGLEWVAVISYD | |
| | | | | | | | | | GSNKYYADSVKGRFTISRDNSKNTLYLQ | |
| | | | | | | | | | VNSLRAEDTAVYYCARSGGGSYRGPFDY | |
| | | | | | | | | | WGQGTLVTVSS | |

| | | | | | | SEQ | | SEQ | | |
|---|---|---|---|---|---|---|---|---|---|---|
| | | Heavy V | Heavy J | Light V | Light J | ID | | ID | | |
| Name | VL | Gene | Gene | Gene | Gene | NO.: | CDRH3 | NO.: | CDRL3 | Sources |
| 2D11 | DIVLTQSPASLAVSLGQRATISCRASES | IGHV1-26 | IGHJ3 | IGKV3-2 | IGKJ1 | 2093 | ARKGDGYYG | 3302 | QQSKEVP | Wafaa Alsoussi et al., |
| | VDNYGISFMNWFQQKPGQPPKLLIYA | (Mouse) | (Mouse) | (Mouse) | (Mouse) | | GFAY | | WT | 2020 |
| | ASNQGSGVPARFSGSGSGTDFSLNIHP | | | | | | | | | (https://www.jimmunol |
| | MEEDDTAMYFFQQSKEVPWTFGGGT | | | | | | | | | .org/content/early/202 |
| | KLEIK | | | | | | | | | 0/06/23/jimmunol.2000 |
| | | | | | | | | | | 583) |
| 2E06 | DIVLTQSPASLTVSLGQRATISCKASQS | IGHV14-3 | IGHJ4 | IGKV3-4 | IGKJ2 | 2094 | ATYGSYYLY | 3303 | QQSNEDP | Wafaa Alsoussi et al., |
| | VDYGGDRYMNWYQQKPGQPPKLLIF | (Mouse) | (Mouse) | (Mouse) | (Mouse) | | YYAMNY | | YT | 2020 |
| | AASNLESGIPARFSGSGSGTDFTLNIHP | | | | | | | | | (https://www.jimmunol |
| | VEEEDAATYYCQQSNEDPYTFGGGTK | | | | | | | | | .org/content/early/202 |
| | LEIK | | | | | | | | | 0/06/23/jimmunol.2000 |
| | | | | | | | | | | 583) |
| 2E10 | DIVLTQSPASLAVSLGQRATMSCRASE | IGHV1-76 | IGHJ4 | IGKV3-4 | IGKJ5 | 2095 | ARYDGNLYYY | 3304 | QQNNEDP | Wafaa Alsoussi et al., |
| | SVDSYGNGFMHWYQQKPGQPPKLLI | (Mouse) | (Mouse) | (Mouse) | (Mouse) | | AMDY | | LT | 2020 |
| | YLASNLESGVPARFSGSGSRTDFSLTID | | | | | | | | | (https://www.jimmunol |
| | PVEADDAAIYYCQQNNEDPLTFGAGT | | | | | | | | | .org/content/early/202 |
| | KLELK | | | | | | | | | 0/06/23/jimmunol.2000 |
| | | | | | | | | | | 583) |
| 2F04 | DIVLTQSPAILSVSPGERVSFSCRASQN | IGHV1-55 | IGHJ2 | IGKV5-48 | IGKJ5 | 2096 | ARWDFYGSR | 3305 | QQSSSWP | Wafaa Alsoussi et al., |
| | IGTIIHWYQQRTNGSPRLLIKYASESVS | (Mouse) | (Mouse) | (Mouse) | (Mouse) | | TEDY | | LT | 2020 |
| | GIPSRFSGSGSGTDFTLSINSVESEDIA | | | | | | | | | (https://www.jimmunol |
| | DYYCQQSSSWPLTFGAGTKLELK | | | | | | | | | .org/content/early/202 |
| | | | | | | | | | | 0/06/23/jimmunol.2000 |
| | | | | | | | | | | 583) |
| 2H04 | DIVLTQSPAILSVSPGERVSFSCRASQN | IGKV5-48 | IGKJ5 | IGHV1-55 | IGHJ2 | 2097 | ARWDFYGSR | 3306 | QQSSSWP | Wafaa Alsoussi et al., |
| | IGTIIHWYQQRTNGSPRLLIKYASESVS | (Mouse) | (Mouse) | (Mouse) | (Mouse) | | TEDY | | LT | 2020 |
| | GIPSRFSGSGSGTDFTLSINSVESEDIA | | | | | | | | | (https://www.jimmunol |
| | DYYCQQSSSWPLTFGAGTKLELK | | | | | | | | | .org/content/early/202 |
| | | | | | | | | | | 0/06/23/jimmunol.2000 |
| | | | | | | | | | | 583) |
| 2M- | QSALTQPHSVSESPGKTVTISCTGSSGS | IGHV3-66 | IGHJ6 | IGLV6-57 | IGLJ3 | 2098 | ARATWLRGV | 3307 | QSYDSSNH | Xiangyang Chi et al., |
| 10B11 | IASNYVQWYQQRPGSAPTTVIYEDNQ | (Human) | (Human) | (Human) | (Human) | | MDVW | | WV | 2020 |
| | RPSGVPDRFSGSIDSSSNSASLTISGLKT | | | | | | | | | (https://science.science |
| | EDEADYYCQSYDSSNHWVFGGGTKLT | | | | | | | | | mag.org/content/early/ |
| | VL | | | | | | | | | 2020/06/19/science.abc |
| | | | | | | | | | | 6952/tab-pdf) |
| 2M-12D7 | AIRMTQSPSSLSASVGDRVTITCRASQ | IGHV3-9 | IGHJ3 | IGKV1-39 | IGKJ3 | 2099 | AKDVRYCSST | 3308 | QQSYSTPR | Xiangyang Chi et al., |
| | SITGYLNWYQQKPGKAPKLLISAASSL | (Human) | (Human) | (Human) | (Human) | | SCYFSAFDI | | T | 2020 |
| | QSGVPSRFSGSGSGTDFTLTISSLQPED | | | | | | | | | (https://science.science |
| | FATYYCQQSYSTPRTFGPGTKVEIK | | | | | | | | | mag.org/content/early/ |
| | | | | | | | | | | 2020/06/19/science.abc |
| | | | | | | | | | | 6952/tab-pdf) |
| 2M-13A3 | AIRMTQSPDSLAVSLGERATINCKSSQ | IGHV3-30 | IGHJ3 | IGKV4-1 | IGKJ5 | 2100 | ARGGGSYYY | 3309 | QQYYSTPF | Xiangyang Chi et al., |
| | SVLYSPNNKNYLAWYQQKPGQPPKLL | (Human) | (Human) | (Human) | (Human) | | WFDP | | T | 2020 |
| | IYWASTRESGVPDRFSGSGSGTDFTLTI | | | | | | | | | (https://science.science |
| | SSLQAEDVAVYYCQQYYSTPFTFGQGT | | | | | | | | | mag.org/content/early/ |
| | RLEIK | | | | | | | | | 2020/06/19/science.abc |
| | | | | | | | | | | 6952/tab-pdf) |
| 2M- | EIVMTQSPGTLSLSPGERATLSCRASQ | IGHV4-34 | IGHJ3 | IGKV3-20 | IGKJ1 | 2101 | ARAGYSSSWY | 3310 | QQYGSSRS | Xiangyang Chi et al., |
| 13D11 | SVSSSYLAWYQQKPGQAPRLLIYGASS | (Human) | (Human) | (Human) | (Human) | | GVRGVDP | | WT | 2020 |
| | RATGIPDRFSGSGSGTDFTLTISRLEPE | | | | | | | | | (https://science.science |
| | DFAVYYCQQYGSSRSWTFGQGTKVEI | | | | | | | | | mag.org/content/early/ |
| | K | | | | | | | | | 2020/06/19/science.abc |
| | | | | | | | | | | 6952/tab-pdf) |
| 2M-14B2 | AIRMTQSPSSLSASVGDRVTITCRASQ | IGHV3-30 | IGHJ5 | IGKV1-39 | IGKJ3 | 2102 | AKGSDIVVVP | 3311 | QQSYSTFT | Xiangyang Chi et al., |
| | SISSYLNWYQQKPGKAPKLLIYAASSLQ | (Human) | (Human) | (Human) | (Human) | | VGNWFDP | | LYT | 2020 |
| | SGVPSRFSGSGSGTDFTLTISSLQPEDF | | | | | | | | | (https://science.science |
| | ATYYCQQSYSTFTLYTFGQGTKVDIK | | | | | | | | | mag.org/content/early/ |
| | | | | | | | | | | 2020/06/19/science.abc |
| | | | | | | | | | | 6952/tab-pdf) |
| 2M-14E4 | DIVMTQSPSSLSASVGDRVSITCRASQ | IGHV4-61 | IGHJ4 | IGKV1-39 | IGKJ3 | 2103 | ARVQRYYPDS | 3312 | QQSHSFPF | Xiangyang Chi et al., |
| | NISNYLNWYQQKPGEAPKLLISAASSL | (Human) | (Human) | (Human) | (Human) | | SGFYGRRFDI | | T | 2020 |
| | QSGVPSRFGGSGSGTGFTLTINSLQPE | | | | | | | | | (https://science.science |
| | DFATYYCQQSHSFPFTFGPGTKVDIK | | | | | | | | | mag.org/content/early/ |
| | | | | | | | | | | 2020/06/19/science.abc |
| | | | | | | | | | | 6952/tab-pdf) |
| 2M-14E5 | AIRMTQSPSFLSVSVGDRVTITCRASQ | IGHV3-30 | IGHJ4 | IGKV1-9 | IGKJ4 | 2104 | ARSGGGSYR | 3313 | QQLNSYVT | Xiangyang Chi et al., |
| | GISSYLAWYQQKPGKAPKLLIYAASTL | (Human) | (Human) | (Human) | (Human) | | GPFDY | | | 2020 |
| | QSGVPSRFSGSGSGTEFTLTISSLQPED | | | | | | | | | (https://science.science |
| | FATYYCQQLNSYVTFGGGTKVEIK | | | | | | | | | mag.org/content/early/ |
| | | | | | | | | | | 2020/06/19/science.abc |
| | | | | | | | | | | 6952/tab-pdf) |

| | | | | | Not | | | | | |
|---|---|---|---|---|---|---|---|---|---|---|
| | Ab | | | Neutral- | Neutral- | | | SEQ | | SEQ |
| | or | | Doesn't | ising | ising | Protein + | | ID | | ID |
| Name | Nb | Binds to | Bind to | Vs | Vs | Epitope | Origin | NO.: | VH or VHH | NO.: |
| 2M-2D1 | Ab | SARS-CoV2 | | | SARS-CoV2 | S; S2 | B-cells; SARS-CoV2 | 111 | EVQLVESGPGLVKPSETLSLTCTVSGGSI | 1193 |
| | | | | | | | Human Patient | | SSSSYYWGWIRQPPGKGLEWIGSIYYSG | |
| | | | | | | | | | STYYNPSLKSRVTISVDTSKNQFSLKLSSV | |
| | | | | | | | | | TAADTAVYYSARGDRIQLWLLDAFDIW | |
| | | | | | | | | | GQGTMVTVSS | |
| 2M-2D4 | Ab | SARS-CoV2 | | | SARS-CoV2 | S; S2 | B-cells; SARS-CoV2 | 112 | EVQLVESGGGLVQPGGSLRLSCAASGFT | 1194 |
| | | | | | | | Human Patient | | FSSYAMSWVRQAPGKGLEWVSAISGSG | |
| | | | | | | | | | GSTYYADSVKGRFTISRDNSKNTLYLQM | |
| | | | | | | | | | NSLRAEDTAVYYCAKIGLGLGGLLRRYFD | |
| | | | | | | | | | YWGQGTLVTVSS | |
| 2M-2G12 | Ab | SARS-CoV2 | | | SARS-CoV2 | S; S2 | B-cells; SARS-CoV2 | 113 | QVQLVESGGGLLKPGETLSLSCAASGFTF | 1195 |
| | | | | | | | Human Patient | | SDYYWSWIRQAPGKGLEWIAVINHSGS | |
| | | | | | | | | | TIYYPYPVKGVFIFSRDTANNFSLKLMN | |
| | | | | | | | | | MMTSDTAVYYCGTRIMITWYSRRGMD | |
| | | | | | | | | | GWGKGVTVTVSS | |
| 2M-4G4 | Ab | SARS-CoV2 | | | SARS-CoV2 | S; RBD | B-cells; SARS-CoV2 | 114 | EVQLVESGAEVKKPGASVKVSCKASGYT | 1196 |
| | | | | | | | Human Patient | | FTSYYIHWVRQAPGQGLEWMGVINPS | |
| | | | | | | | | | GGSTTYAQKFQGRVTVTRDTSTSTVYM | |
| | | | | | | | | | ELSSLRSEDTAVYYCARERGDSSGYYEIIT | |
| | | | | | | | | | TANRRFGMDVWGQGTTVTVSS | |
| 2M-7E9 | Ab | SARS-CoV2 | | | SARS-CoV2 | S; S2 | B-cells; SARS-CoV2 | 115 | EVQLVESGAEVKKPGSSVKVSCKASGGT | 1197 |
| | | | | | | | Human Patient | | FSSFAISWVRQAPGQGLEWMGGIIPIFD | |
| | | | | | | | | | TTNYAQKFQGRVTITADESTRTAYMELS | |
| | | | | | | | | | SLRSEDTAVYYCARIPGWDRGTDRNWN | |
| | | | | | | | | | DDWGQGTTVTVSS | |
| 2M-8E7 | Ab | SARS-CoV2 | | | SARS-CoV2 | S; S2 | B-cells; SARS-CoV2 | 116 | EVQLVESGAEVKKPGSSVKVSCKASGGT | 1198 |
| | | | | | | | Human Patient | | FSSYAISWVRQAPGQGLEWMGGIIPIFG | |
| | | | | | | | | | TANYAQKFQGRVTVTADESTSTAYMELS | |
| | | | | | | | | | SLRSEDTAVYYCARTYSFDSSGYYYDYW | |
| | | | | | | | | | GQGTMVTVSS | |
| 2M-8H10 | Ab | SARS-CoV2 | | | SARS-CoV2 | S; S2 | B-cells; SARS-CoV2 | 117 | QVQLVESGGGVVLPGRSLRLSCAASGFT | 1199 |
| | | | | | | | Human Patient | | FSTFAMHWVRQAPGKGLEWVAVISDE | |
| | | | | | | | | | GSNKYYADSVKGRFTISRDNSRNTLYLQ | |
| | | | | | | | | | MNSLRAEDTAVYYCARAFYDSNWSVGS | |
| | | | | | | | | | YFDSWGQGTPVTVSS | |
| 2M-9F10 | Ab | SARS-CoV2 | | | SARS-CoV2 | S; S2 | B-cells; SARS-CoV2 | 118 | EVQLLQSGGDLIQPGRSLRLSCAASGFSF | 1200 |
| | | | | | | | Human Patient | | EDYAMHWVRQAPGQGLEWVSGISYN | |
| | | | | | | | | | GGSIDYVDSVKGRFTISRDNAKNALYLE | |
| | | | | | | | | | MNSLRPEDTAFYYCAKDSVRREYTHARV | |
| | | | | | | | | | PFDNWGLGTLVTVSS | |
| 2M-9H1 | Ab | SARS-CoV2 | | | SARS-CoV2 | S; S2 | B-cells; SARS-CoV2 | 119 | EVQLLESGGGVVQPGRSLRLSCVASGEN | 1201 |
| | | | | | | | Human Patient | | FNNYGMHWVRQAPGKGLEWLAALSYE | |
| | | | | | | | | | GSKEHYADSLKGRFTVSRDYSRATLHLH | |
| | | | | | | | | | MNSLEPEDTAVYFCAKSSKIFYLGESREV | |
| | | | | | | | | | DYWGRGTLVTVSS | |
| 31B5 | Ab | SARS-CoV2 | | SARS-CoV2 | | S; RBD | B-cells; SARS-CoV2 | | ND | |
| | | | | | | | Human Patient | | | |
| 31B9 | Ab | SARS-CoV2 | | | SARS-CoV2 | S; RBD | B-cells; SARS-CoV2 | | ND | |
| | | | | | | | Human Patient | | | |
| 32D4 | Ab | SARS-CoV2 | | SARS-CoV2 | | S; RBD | B-cells; SARS-CoV2 | | ND | |
| | | | | | | | Human Patient | | | |
| 413-2 | Ab | SARS-CoV2 | SARS- | SARS-CoV2 | SARS-CoV1 | S; non- | B-cells; SARS-CoV2 | | ND | |
| | | | CoV1 | | | RBD | Human Patient | | | |

| | | | | | | SEQ | | SEQ | | |
|---|---|---|---|---|---|---|---|---|---|---|
| | | Heavy V | Heavy J | Light V | Light J | ID | | ID | | |
| Name | VL | Gene | Gene | Gene | Gene | NO.: | CDRH3 | NO.: | CDRL3 | Sources |
| 2M-2D1 | QSVLTQLPSASGTPGQTVTISCSGNVF | IGHV4-39 | IGHJ3 | IGLV1-47 | IGLJ3 | 2105 | ARGDRIQLW | 3314 | AARDDSLS | Xiangyang Chi et al., |
| | KEKSNYVYWYQQLPGTAPKLLIYRNN | (Human) | (Human) | (Human) | (Human) | | LLDAFDI | | GWV | 2020 |
| | HRPSGVPDRFSGSKSGTSPSLAISGLRS | | | | | | | | | (https://science.science |
| | EDEADYYCAARDDSLSGWVFSGRTKL | | | | | | | | | mag.org/content/early/ |
| | TVL | | | | | | | | | 2020/06/19/science.abc |
| | | | | | | | | | | 6952/tab-pdf) |
| 2M-2D4 | EIVMTQSPATLSLSPGERATLSCRASQS | IGHV3-23 | IGHJ4 | IGKV3-11 | IGKJ3 | 2106 | AKIGLGLG | 3315 | QQRTNWP | Xiangyang Chi et al., |
| | VSTSLAWYQQKPGQAPRLLIYDASNR | (Human) | (Human) | (Human) | (Human) | | GLLRRYFDY | | L | 2020 |
| | ATGVPARFSGSGSGTDFTLTISSLEPDD | | | | | | | | | (https://science.science |
| | FAVYYCQQRTNWPLFGPGTKVEIK | | | | | | | | | mag.org/content/early/ |
| | | | | | | | | | | 2020/06/19/science.abc |
| | | | | | | | | | | 6952/tab-pdf) |
| 2M-2G12 | DIQMTQSPSSLSVSAGERATLSCRASQ | IGHV3-11 | IGHJ6 | IGKV1-39 | IGKJ1 | 2107 | GTRIMITW | 3316 | QQNYSTW | Xiangyang Chi et al., |
| | SVSSYLIWCHQKPGKAPKLLIYDASTLQ | (Human) | (Human) | (Human) | (Human) | | YSRRGMDG | | T | 2020 |
| | TGVPSRFIGGGSGTNFTLTIISLQPEDF | | | | | | | | | (https://science.science |
| | AAYYCQQNYSTWTIGQGSRVEMK | | | | | | | | | mag.org/content/early/ |
| | | | | | | | | | | 2020/06/19/science.abc |
| | | | | | | | | | | 6952/tab-pdf) |
| 2M-4G4 | QSVLTQPASVSGSPGQSITISCTGTSSD | IGHV1-46 | IGHJ6 | IGLV2-23 | IGLJ3 | 2108 | ARERGDSS | 3317 | CSYAVSST | Xiangyang Chi et al., |
| | VGMYNLVSWYQQHPGQAPKLMIYE | (Human) | (Human) | (Human) | (Human) | | GYYEIITT | | WV | 2020 |
| | GSKRPSGVSNRFSGSKSGNTASLTISGL | | | | | | ANRRFGMDV | | | (https://science.science |
| | QAEDEAYYYCCSYAVSSTWVFGGGTK | | | | | | | | | mag.org/content/early/ |
| | LTVL | | | | | | | | | 2020/06/19/science.abc |
| | | | | | | | | | | 6952/tab-pdf) |
| 2M-7E9 | DIVMTQSPATLSLSPGERATLSCRASQ | IGHV1-69 | IGHJ6 | IGKV3-11 | IGKJ3 | 2109 | ARIPGWDRG | 3318 | QQRSNWP | Xiangyang Chi et al., |
| | SVSNFLAWYQQKPGQAPRLLIYDASN | (Human) | (Human) | (Human) | (Human) | | TDRNWNDD | | PAFT | 2020 |
| | RATGIPARFSGSGSGTDFTLTISSLEPE | | | | | | | | | (https://science.science |
| | DFAVYYCQQRSNWPPAFTFGPGTKVE | | | | | | | | | mag.org/content/early/ |
| | IK | | | | | | | | | 2020/06/19/science.abc |
| | | | | | | | | | | 6952/tab-pdf) |
| 2M-8E7 | EIVLTQSPATLSLSPGERATLSCRASQS | IGHV1-69 | IGHJ4 | IGKV3-11 | IGKJ5 | 2110 | ARTYSFDS | 3319 | QQRSNWP | Xiangyang Chi et al., |
| | VSSYLAWYQQKPGQAPRLLIYDASNR | (Human) | (Human) | (Human) | (Human) | | SGYYYDY | | PKIT | 2020 |
| | ATGIPARFSGSGSGTDFTLTISSLEPEDF | | | | | | | | | (https://science.science |
| | AVYYCQQRSNWPPKITFGQGTRLEIK | | | | | | | | | mag.org/content/early/ |
| | | | | | | | | | | 2020/06/19/science.abc |
| | | | | | | | | | | 6952/tab-pdf) |
| 2M-8H10 | DIQMTQSPDSLAVSLGERATIKCKSSQ | IGHV3-30 | IGHJ5 | IGKV4-1 | IGKJ1 | 2111 | ARAFYDSNW | 3320 | QQYYNNQ | Xiangyang Chi et al., |
| | SVLHSSNNKNYLAWYQQKAGQPPSLL | (Human) | (Human) | (Human) | (Human) | | SVGSYFDS | | WT | 2020 |
| | LYWASTRESGVPDRFSGSGSGTDFTLT | | | | | | | | | (https://science.science |
| | ISSLQAEDVAVYYCQQYYNNQWTFGQ | | | | | | | | | mag.org/content/early/ |
| | GTKVDIK | | | | | | | | | 2020/06/19/science.abc |
| | | | | | | | | | | 6952/tab-pdf) |
| 2M-9F10 | AIRMTQSPSSLSASVGDRVTISCRATQ | IGHV3-9 | IGHJ4 | IGKV1-39 | IGKJ3 | 2112 | AKDSVRRE | 3321 | QQSFVSP | Xiangyang Chi et al., |
| | NINYFLNWYQQKPGRAPKLLIYAASGL | (Human) | (Human) | (Human) | (Human) | | YTHARVPF | | RT | 2020 |
| | QSGVPSRFSGSGTGRVFTLTINSLQPD | | | | | | DN | | | (https://science.science |
| | DFATYYCQQSFVSPRTFGQGTKVDIK | | | | | | | | | mag.org/content/early/ |
| | | | | | | | | | | 2020/06/19/science.abc |
| | | | | | | | | | | 6952/tab-pdf) |
| 2M-9H1 | DIVMTQSPSSLSAFVGDRVTITCRASR | IGHV3-30 | IGHJ4 | IGKV1-17 | IGKJ4 | 2113 | AKSSKIFYL | 3322 | LQHKSYP | Xiangyang Chi et al., |
| | DIGGDLSWFQQKPGKAPERLIYAASSL | (Human) | (Human) | (Human) | (Human) | | GESREVDY | | LT | 2020 |
| | ESGVPSRFSGSGSATEFALTITSLQPED | | | | | | | | | (https://science.science |
| | FATYYCLQHKSYPLTFGGGTKVDIK | | | | | | | | | mag.org/content/early/ |
| | | | | | | | | | | 2020/06/19/science.abc |
| | | | | | | | | | | 6952/tab-pdf) |
| 31B5 | ND | ND | ND | ND | ND | 2114 | ARVEYYYG | | ND | Xiangyu Chen et al., |
| | | | | | | | SGSYMPWYF | | | 2020 |
| | | | | | | | DL | | | (https://www.nature.co |
| | | | | | | | | | | m/articles/s41423-020- |
| | | | | | | | | | | 0426-7) |
| 31B9 | ND | ND | ND | ND | ND | 2115 | ATYYYDSS | | ND | Xiangyu Chen et al., |
| | | | | | | | GYSYGMDV | | | 2020 |
| | | | | | | | | | | (https://www.nature.co |
| | | | | | | | | | | m/articles/s41423-020- |
| | | | | | | | | | | 0426-7) |
| 32D4 | ND | ND | ND | ND | ND | 2116 | TEEGSGSE | | ND | Xiangyu Chen et al., |
| | | | | | | | GPIEFDY | | | 2020 |
| | | | | | | | | | | (https://www.nature.co |
| | | | | | | | | | | m/articles/s41423-020- |
| | | | | | | | | | | 0426-7) |
| 413-2 | ND | ND | ND | ND | ND | 2117 | ARDNNYRN | 3323 | QQYGSSP | Jinkai Wan et al., 2020 |
| | | | | | | | YYYYMDVW | | PLT | (https://www.sciencedi |
| | | | | | | | | | | rect.com/science/articl |
| | | | | | | | | | | e/pii/S22111247203089 |
| | | | | | | | | | | 98) |

| | | | | | Not | | | | | |
|---|---|---|---|---|---|---|---|---|---|---|
| | Ab | | | Neutral- | Neutral- | | | SEQ | | SEQ |
| | or | | Doesn't | ising | ising | Protein + | | ID | | ID |
| Name | Nb | Binds to | Bind to | Vs | Vs | Epitope | Origin | NO.: | VH or VHH | NO.: |
| 414-1 | Ab | SARS-CoV2 | SARS- | SARS-CoV2 | SARS-CoV1 | S; RBD | B-cells; SARS-CoV2 | | ND | |
| | | | CoV1 | | | | Human Patient | | | |
| 47D11 | Ab | SARS-CoV1, | | SARS-CoV2 | | S; RBD | B-cells; SARS-CoV1 | | ND | |
| | | SARS-CoV2 | | and SARS- | | | Human Patient | | | |
| | | | | CoV1 | | | | | | |
| 4A8 | Ab | SARS-CoV2 | | SARS-CoV2 | | S; S1 (non- | B-cells; SARS-CoV2 | 120 | EVQLVESGAEVKKPGASVKVSCKVSGYT | 1202 |
| | | | | | | RBD) | Human Patient | | LTELSMHWVRQAPGKGLEWMGGFDP | |
| | | | | | | | | | EDGETMYAQKFQGRVTMTEDTSTDTAY | |
| | | | | | | | | | MELSSLRSEDTAVYYCATSTAVAGTPDLF | |
| | | | | | | | | | DYYYGMDVWGQGTTVTVSS | |
| 505-3 | Ab | SARS-CoV2 | SARS- | SARS-CoV2 | SARS-CoV1 | S; RBD | B-cells; SARS-CoV2 | | ND | |
| | | | CoV1 | | | | Human Patient | | | |
| 505-5 | Ab | SARS-CoV2 | SARS- | SARS-CoV2 | SARS-CoV1 | S; RBD | B-cells; SARS-CoV2 | | ND | |
| | | | CoV1 | | | | Human Patient | | | |
| 505-8 | Ab | SARS-CoV2 | SARS- | SARS-CoV2 | SARS-CoV1 | S; non- | B-cells; SARS-CoV2 | | ND | |
| | | | CoV1 | | | RBD | Human Patient | | | |
| 515-1 | Ab | SARS-CoV2 | SARS- | SARS-CoV2 | SARS-CoV1 | S; RBD | B-cells; SARS-CoV2 | | ND | |
| | | | CoV1 | | | | Human Patient | | | |
| 515-5 | Ab | SARS-CoV2 | SARS- | SARS-CoV2 | SARS-CoV1 | S; non- | B-cells; SARS-CoV2 | | ND | |
| | | | CoV1 | | | RBD | Human Patient | | | |
| 553-15 | Ab | SARS-CoV1, | | SARS-CoV1, | | S; RBD | B-cells; SARS-CoV2 | | ND | |
| | | SARS-CoV2 | | SARS-CoV2 | | | Human Patient | | | |
| 553-49 | Ab | SARS-CoV2 | SARS- | SARS-CoV2 | SARS-CoV1 | S; RBD | B-cells; SARS-CoV2 | | ND | |
| | | | CoV1 | | | | Human Patient | | | |
| 553-60 | Ab | SARS-CoV2 | SARS- | SARS-CoV2 | SARS-CoV1 | S; RBD | B-cells; SARS-CoV2 | | ND | |
| | | | CoV1 | | | | Human Patient | | | |
| 553-63 | Ab | SARS-CoV2 | SARS- | SARS-CoV2 | SARS-CoV1 | S; RBD | B-cells; SARS-CoV2 | | ND | |
| | | | CoV1 | | | | Human Patient | | | |
| 8D2 | Ab | SARS-CoV2 | | | SARS-CoV2 | S; S2 | B-cells; SARS-CoV2 | 121 | EVQLVESGGGLVQPGGSLRLSCAASGFT | 1203 |
| | | | | | | | Human Patient | | FSSYWMSWVRQAPGKGLEWVANINQ | |
| | | | | | | | | | DGSEKYYVDSVKGRFTISRDNAKNSLYL | |
| | | | | | | | | | QVNSLRAEDTAVYYCARDWDYDILTGS | |
| | | | | | | | | | WFGAFDIWGQGTTVTVSS | |
| 8D9 | Ab | SARS-CoV2 | | | SARS-CoV2 | S; S2 | B-cells; SARS-CoV2 | 122 | EVQLLESGGGLVQPGGSLRLSCTASGFT | 1204 |
| | | | | | | | Human Patient | | FSSYWMSWVRQAPGKGLEWVANIQQ | |
| | | | | | | | | | DGSEKYYVDSVKGRFTISRDNAKNSLYL | |
| | | | | | | | | | QMNSLRAEDTAVYYCARPTIGYSYGSDY | |
| | | | | | | | | | WGQGTTVTVSS | |

| | | | | | | SEQ | | SEQ | | |
|---|---|---|---|---|---|---|---|---|---|---|
| | | Heavy V | Heavy J | Light V | Light J | ID | | ID | | |
| Name | VL | Gene | Gene | Gene | Gene | NO.: | CDRH3 | NO.: | CDRL3 | Sources |
| 414-1 | ND | ND | ND | ND | ND | 2118 | ARGALGCSST | 3324 | AAWDDSL | Jinkai Wan et al., 2020 |
| | | | | | | | SCYPNNFDY | | NGVV | (https://www.sciencedi |
| | | | | | | | W | | | rect.com/science/articl |
| | | | | | | | | | | e/pii/S22111247203089 |
| | | | | | | | | | | 98) |
| 47D11 | ND | ND | ND | ND | ND | 2119 | ND | | ND | Chunyan Wang et al., |
| | | | | | | | | | | 2020 |
| | | | | | | | | | | (https://www.nature.co |
| | | | | | | | | | | m/articles/s41467-020- |
| | | | | | | | | | | 16256-y) |
| 4A8 | EIVMTQSPLSSPVTLGQPASISCRSSQS | IGHV1-24 | IGHJ6 | IGKV2-24 | IGKJ3 | 2120 | ATSTAVAGTP | 3325 | TQATQFPY | Xiangyang Chi et al., |
| | LVHSDGNTYLSWLQQRPGQPPRLLIY | (Human) | (Human) | (Human) | (Human) | | DLFDYYYGM | | T | 2020 |
| | KISNRFSGVPDRFSGSGAGTDFTLKISR | | | | | | DV | | | (https://science.science |
| | VEAEDVGVYYCTQATQFPYTFGQGTK | | | | | | | | | mag.org/content/early/ |
| | VDIK | | | | | | | | | 2020/06/19/science.abc |
| | | | | | | | | | | 6952/tab-pdf) |
| 505-3 | ND | ND | ND | ND | ND | 2121 | ARDFISRPRG | 3326 | MQGTHW | Jinkai Wan et al., 2020 |
| | | | | | | | YRW | | PPT | (https://www.sciencedi |
| | | | | | | | | | | rect.com/science/articl |
| | | | | | | | | | | e/pii/S22111247203089 |
| | | | | | | | | | | 98) |
| 505-5 | ND | ND | ND | ND | ND | 2122 | ARDFISRPRG | 3327 | MQGTHW | Jinkai Wan et al., 2020 |
| | | | | | | | YRW | | PPT | (https://www.sciencedi |
| | | | | | | | | | | rect.com/science/articl |
| | | | | | | | | | | e/pii/S22111247203089 |
| | | | | | | | | | | 98) |
| 505-8 | ND | ND | ND | ND | ND | 2123 | ARGQDDFWS | 3328 | SSYTSSSIV | Jinkai Wan et al., 2020 |
| | | | | | | | MNWFDPW | | V | (https://www.sciencedi |
| | | | | | | | | | | rect.com/science/articl |
| | | | | | | | | | | e/pii/S22111247203089 |
| | | | | | | | | | | 98) |
| 515-1 | ND | ND | ND | ND | ND | 2124 | ARDFISRPRG | 3329 | MQGTHW | Jinkai Wan et al., 2020 |
| | | | | | | | YRW | | PPT | (https://www.sciencedi |
| | | | | | | | | | | rect.com/science/articl |
| | | | | | | | | | | e/pii/S22111247203089 |
| | | | | | | | | | | 98) |
| 515-5 | ND | ND | ND | ND | ND | 2125 | TRGSQWATI | 3330 | LQHNSYPI | Jinkai Wan et al., 2020 |
| | | | | | | | NDARFDYW | | T | (https://www.sciencedi |
| | | | | | | | | | | rect.com/science/articl |
| | | | | | | | | | | e/pii/S22111247203089 |
| | | | | | | | | | | 98) |
| 553-15 | ND | ND | ND | ND | ND | 2126 | ARVWYYYGP | 3331 | QSYDGSN | Jinkai Wan et al., 2020 |
| | | | | | | | RDYW | | HNVV | (https://www.sciencedi |
| | | | | | | | | | | rect.com/science/articl |
| | | | | | | | | | | e/pii/S22111247203089 |
| | | | | | | | | | | 98) |
| 553-49 | ND | ND | ND | ND | ND | 2127 | AKDSSSWYNY | 3332 | QSYDSSNH | Jinkai Wan et al., 2020 |
| | | | | | | | YGMDVW | | VV | (https://www.sciencedi |
| | | | | | | | | | | rect.com/science/articl |
| | | | | | | | | | | e/pii/S22111247203089 |
| | | | | | | | | | | 98) |
| 553-60 | ND | ND | ND | ND | ND | 2128 | ARVFRGSQY | 3333 | QQYGSSPP | Jinkai Wan et al., 2020 |
| | | | | | | | WFDPW | | T | (https://www.sciencedi |
| | | | | | | | | | | rect.com/science/articl |
| | | | | | | | | | | e/pii/S22111247203089 |
| | | | | | | | | | | 98) |
| 553-63 | ND | ND | ND | ND | ND | 2129 | ARMEAPKLTL | 3334 | QQSYSIPR | Jinkai Wan et al., 2020 |
| | | | | | | | DPW | | T | (https://www.sciencedi |
| | | | | | | | | | | rect.com/science/articl |
| | | | | | | | | | | e/pii/S22111247203089 |
| | | | | | | | | | | 98) |
| 8D2 | DIQMTQSPSSLSASVGDRVTITCRASQ | IGHV3-7 | IGHJ3 | IGKV1-17 | IGKJ4 | 2130 | ARDWDYDILT | 3335 | LQHNSYPL | Xiangyang Chi et al., |
| | GIRNDLGWYQQKPGKAPKRLIYAASSL | (Human) | (Human) | (Human) | (Human) | | GSWFGAFDI | | T | 2020 |
| | QSGVPSRFSGSGSGTEFTLTISSLQPED | | | | | | | | | (https://science.science |
| | FATYYCLQHNSYPLTFGGGTKVEIK | | | | | | | | | mag.org/content/early/ |
| | | | | | | | | | | 2020/06/19/science.abc |
| | | | | | | | | | | 6952/tab-pdf) |
| 8D9 | SYELTQPPSVSVSPGQTASITCSGDKLG | IGHV3-7 | IGHJ4 | IGLV3-1 | IGLJ3 | 2131 | ARPTIGYSYGS | 3336 | QAWDSST | Xiangyang Chi et al., |
| | DKYACWYRQKPGQSPVLVIYQDSKRP | (Human) | (Human) | (Human) | (Human) | | DY | | GV | 2020 |
| | SGIPERFSGSNSGNTATLTISGTQAMD | | | | | | | | | (https://science.science |
| | EADYYCQAWDSSTGVFGGGTKLTVL | | | | | | | | | mag.org/content/early/ |
| | | | | | | | | | | 2020/06/19/science.abc |
| | | | | | | | | | | 6952/tab-pdf) |

| | | | | | Not | | | | | |
|---|---|---|---|---|---|---|---|---|---|---|
| | Ab | | | Neutral- | Neutral- | | | SEQ | | SEQ |
| | or | | Doesn't | ising | ising | Protein + | | ID | | ID |
| Name | Nb | Binds to | Bind to | Vs | Vs | Epitope | Origin | NO.: | VH or VHH | NO.: |
| 9A1 | Ab | SARS-CoV2 | | | SARS-CoV2 | S; S2 | B-cells; SARS-CoV2 | 123 | EVQLLESGGGVVQPGRSLRLSCVVSGFT | 1205 |
| | | | | | | | Human Patient | | FNNYGMHWVRQAPGKGLEWVAVISYE | |
| | | | | | | | | | GSVKYYGDHVDGRFTISRDPFKNTLYLH | |
| | | | | | | | | | MNNLRPDDTAVYYCAKVSAIFWLGQGL | |
| | | | | | | | | | SPIDVWGQGTTVTVSS | |
| Ab_510A4 | Ab | SARS-CoV2 | | SARS-CoV2 | | S; RBD | B-cells; SARS-CoV2 | | ND | |
| | | | | (weak) | | | Human Patient | | | |
| Ab_510A5 | Ab | SARS-CoV2 | | | SARS-CoV2 | S; RBD | B-cells; SARS-CoV2 | | ND | |
| | | | | | | | Human Patient | | | |
| Ab_510D7 | Ab | SARS-CoV2 | | SARS-CoV2 | | S; RBD | B-cells; SARS-CoV2 | | ND | |
| | | | | | | | Human Patient | | | |
| Ab_510G4 | Ab | SARS-CoV2 | | SARS-CoV2 | | S; RBD | B-cells; SARS-CoV2 | | ND | |
| | | | | | | | Human Patient | | | |
| Ab_510H10 | Ab | SARS-CoV2 | | | | S; RBD | B-cells; SARS-CoV2 | | ND | |
| | | | | | | | Human Patient | | | |
| Ab_510H2 | Ab | SARS-CoV2 | | SARS-CoV2 | | S; RBD | B-cells; SARS-CoV2 | | ND | |
| | | | | (weak) | | | Human Patient | | | |
| Ab_510H4 | Ab | SARS-CoV2 | | SARS-CoV2 | | S; RBD | B-cells; SARS-CoV2 | | ND | |
| | | | | | | | Human Patient | | | |
| Ab_510H7 | Ab | SARS-CoV2 | | SARS-CoV2 | | S; RBD | B-cells; SARS-CoV2 | | ND | |
| | | | | | | | Human Patient | | | |
| Ab_511A1 | Ab | SARS-CoV2 | | | | S; RBD | B-cells; SARS-CoV2 | | ND | |
| | | | | | | | Human Patient | | | |
| Ab_511A5 | Ab | SARS-CoV2 | | SARS-CoV2 | | S; RBD | B-cells; SARS-CoV2 | | ND | |
| | | | | | | | Human Patient | | | |
| Ab_511B11 | Ab | SARS-CoV2 | | | | S; RBD | B-cells; SARS-CoV2 | | ND | |
| | | | | | | | Human Patient | | | |

| | | | | | | SEQ | | SEQ | | |
|---|---|---|---|---|---|---|---|---|---|---|
| | | Heavy V | Heavy J | Light V | Light J | ID | | ID | | |
| Name | VL | Gene | Gene | Gene | Gene | NO.: | CDRH3 | NO.: | CDRL3 | Sources |
| 9A1 | DIVMTQSPATLSASPGERVTLSCRASQ | IGHV3-30 | IGHJ6 | IGKV3-15 | IGKJ3 | 2132 | AKVSAIFWLG | 3337 | HQYSKWP | Xiangyang Chi et al., |
| | NIRNNLAWYQQKPGQAPRLLIHGAST | (Human) | (Human) | (Human) | (Human) | | QGLSPIDV | | VT | 2020 |
| | RAAGAPARFSGSGSDTQFTLTVSSLQS | | | | | | | | | (https://science.science |
| | EDFAVYYCHQYSKWPVTFGGGTKVDI | | | | | | | | | mag.org/content/early/ |
| | K | | | | | | | | | 2020/06/19/science.abc |
| | | | | | | | | | | 6952/tab-pdf) |
| Ab_510A4 | ND | IGHV2-70 | IGHJ4 | IGKV2-28 | IGKJ1 | 2133 | ARVQVAAAG | 3338 | MQALQM | Xiaojian Han et al., 2020 |
| | | (Human) | (Human) | (Human) | (Human) | | SPYDY | | GT | (https://www.biorxiv.or |
| | | | | | | | | | | g/content/10.1101/202 |
| | | | | | | | | | | 0.08.19.253369v2.full.p |
| | | | | | | | | | | df+html) |
| Ab_510A5 | ND | IGHV3-9 | IGHJ4 | IGKV1-39 | IGKJ2 | 2134 | AKDRGYEILTP | 3339 | QQSYSTPP | Xiaojian Han et al., 2020 |
| | | (Human) | (Human) | (Human) | (Human) | | ASFDY | | YT | (https://www.biorxiv.or |
| | | | | | | | | | | g/content/10.1101/202 |
| | | | | | | | | | | 0.08.19.253369v2.full.p |
| | | | | | | | | | | df+html) |
| Ab_510D7 | ND | IGHV1-69 | IGHJ4 | IGKV3-20 | IGKJ2 | 2135 | ATGRYTYGYG | 3340 | QQYGSSRT | Xiaojian Han et al., 2020 |
| | | (Human) | (Human) | (Human) | (Human) | | YYFDY | | | (https://www.biorxiv.or |
| | | | | | | | | | | g/content/10.1101/202 |
| | | | | | | | | | | 0.08.19.253369v2.full.p |
| | | | | | | | | | | df+html) |
| Ab_510G4 | ND | IGHV4-31 | IGHJ4 | IGKV1-33 | IGKJ4 | 2136 | ARDYGGNSN | 3341 | QQYDTLPL | Xiaojian Han et al., 2020 |
| | | (Human) | (Human) | (Human) | (Human) | | YFHY | | T | (https://www.biorxiv.or |
| | | | | | | | | | | g/content/10.1101/202 |
| | | | | | | | | | | 0.08.19.253369v2.full.p |
| | | | | | | | | | | df+html) |
| Ab_510H10 | ND | IGHV2-70 | IGHJ4 | IGKV1-39 | IGKJ2 | 2137 | ARIQRGIAAD | 3342 | QQSYSTPR | Xiaojian Han et al., 2020 |
| | | (Human) | (Human) | (Human) | (Human) | | Y | | T | (https://www.biorxiv.or |
| | | | | | | | | | | g/content/10.1101/202 |
| | | | | | | | | | | 0.08.19.253369v2.full.p |
| | | | | | | | | | | df+html) |
| Ab_510H2 | ND | IGHV3-66 | IGHJ4 | IGKV1-9 | IGKJ4 | 2138 | ARDKWEGTF | 3343 | QQLNSYPR | Xiaojian Han et al., 2020 |
| | | (Human) | (Human) | (Human) | (Human) | | DY | | MT | (https://www.biorxiv.or |
| | | | | | | | | | | g/content/10.1101/202 |
| | | | | | | | | | | 0.08.19.253369v2.full.p |
| | | | | | | | | | | df+html) |
| Ab_510H4 | ND | IGHV3-66 | IGHJ6 | IGKV3-11 | IGKJ1 | 2139 | AETGWDGM | 3344 | QQRSNWP | Xiaojian Han et al., 2020 |
| | | (Human) | (Human) | (Human) | (Human) | | DV | | GT | (https://www.biorxiv.or |
| | | | | | | | | | | g/content/10.1101/202 |
| | | | | | | | | | | 0.08.19.253369v2.full.p |
| | | | | | | | | | | df+html) |
| Ab_510H7 | ND | IGHV4-59 | IGHJ5 | IGKV1D-13 | IGKJ4 | 2140 | ARHCPWQQL | 3345 | QQFNNFLL | Xiaojian Han et al., 2020 |
| | | (Human) | (Human) | (Human) | (Human) | | VSNWFDP | | T | (https://www.biorxiv.or |
| | | | | | | | | | | g/content/10.1101/202 |
| | | | | | | | | | | 0.08.19.253369v2.full.p |
| | | | | | | | | | | df+html) |
| Ab_511A1 | ND | IGHV4-31 | IGHJ6 | IGKV3-15 | IGKJ1 | 2141 | AREKIRSIAAA | 3346 | QQYNNWP | Xiaojian Han et al., 2020 |
| | | (Human) | (Human) | (Human) | (Human) | | GTVYYYGMD | | PWT | (https://www.biorxiv.or |
| | | | | | | | V | | | g/content/10.1101/202 |
| | | | | | | | | | | 0.08.19.253369v2.full.p |
| | | | | | | | | | | df+html) |
| Ab_511A5 | ND | IGHV4-31 | IGHJ2 | IGLV3-21 | IGLJ1 | 2142 | ARIYRGTMVV | 3347 | QVWDSSA | Xiaojian Han et al., 2020 |
| | | (Human) | (Human) | (Human) | (Human) | | VFSDLHWYFD | | DHYV | (https://www.biorxiv.or |
| | | | | | | | L | | | g/content/10.1101/202 |
| | | | | | | | | | | 0.08.19.253369v2.full.p |
| | | | | | | | | | | df+html) |
| Ab_511B11 | ND | IGHV3-7 | IGHJ4 | IGLV1-40 | IGLJ1 | 2143 | AGLFWYGGY | 3348 | QSYDRSLS | Xiaojian Han et al., 2020 |
| | | (Human) | (Human) | (Human) | (Human) | | FDY | | VLYV | (https://www.biorxiv.or |
| | | | | | | | | | | g/content/10.1101/202 |
| | | | | | | | | | | 0.08.19.253369v2.full.p |
| | | | | | | | | | | df+html) |

| | | | | | Not | | | | | |
|---|---|---|---|---|---|---|---|---|---|---|
| | Ab | | | Neutral- | Neutral- | | | SEQ | | SEQ |
| | or | | Doesn't | ising | ising | Protein + | | ID | | ID |
| Name | Nb | Binds to | Bind to | Vs | Vs | Epitope | Origin | NO.: | VH or VHH | NO.: |
| Ab_511B4 | Ab | SARS-CoV2 | | SARS-CoV2 | | S; RBD | B-cells; SARS-CoV2 | | ND | |
| | | | | | | | Human Patient | | | |
| Ab_511D11 | Ab | SARS-CoV2 | | | | S; RBD | B-cells; SARS-CoV2 | | ND | |
| | | | | | | | Human Patient | | | |
| Ab_511E5 | Ab | SARS-CoV2 | | | | S; RBD | B-cells; SARS-CoV2 | | ND | |
| | | | | | | | Human Patient | | | |
| Ab_511E7 | Ab | SARS-CoV2 | | | | S; RBD | B-cells; SARS-CoV2 | | ND | |
| | | | | | | | Human Patient | | | |
| Ab_511E9 | Ab | SARS-CoV2 | | | | S; RBD | B-cells; SARS-CoV2 | | ND | |
| | | | | | | | Human Patient | | | |
| Ab_511G5 | Ab | SARS-CoV2 | | | | S; RBD | B-cells; SARS-CoV2 | | ND | |
| | | | | | | | Human Patient | | | |
| Ab_511G7 | Ab | SARS-CoV2 | | SARS-CoV2 | | S; RBD | B-cells; SARS-CoV2 | | ND | |
| | | | | | | | Human Patient | | | |
| Ab_511H11 | Ab | SARS-CoV2 | | | | S; RBD | B-cells; SARS-CoV2 | | ND | |
| | | | | | | | Human Patient | | | |
| Ab_511H7 | Ab | SARS-CoV2 | | | | S; RBD | B-cells; SARS-CoV2 | | ND | |
| | | | | | | | Human Patient | | | |
| Ab_51A1 | Ab | SARS-CoV2 | | SARS-CoV2 | | S; RBD | B-cells; SARS-CoV2 | | ND | |
| | | | | (weak) | | | Human Patient | | | |
| Ab_51A3 | Ab | SARS-CoV2 | | | | S; RBD | B-cells; SARS-CoV2 | | ND | |
| | | | | | | | Human Patient | | | |
| Ab_51D2 | Ab | SARS-CoV2 | | SARS-CoV2 | | S; RBD | B-cells; SARS-CoV2 | | ND | |
| | | | | | | | Human Patient | | | |

| | | | | | | SEQ | | SEQ | | |
|---|---|---|---|---|---|---|---|---|---|---|
| | | Heavy V | Heavy J | Light V | Light J | ID | | ID | | |
| Name | VL | Gene | Gene | Gene | Gene | NO.: | CDRH3 | NO.: | CDRL3 | Sources |
| Ab_511B4 | ND | IGHV4-59 | IGHJ5 | IGKV1D-12 | IGKJ4 | 2144 | ASTYWDSSGY | 3349 | QQANSFRL | Xiaojian Han et al., 2020 |
| | | (Human) | (Human) | (Human) | (Human) | | YYGVDY | | T | (https://www.biorxiv.or |
| | | | | | | | | | | g/content/10.1101/202 |
| | | | | | | | | | | 0.08.19.253369v2.full.p |
| | | | | | | | | | | df+html) |
| Ab_511D11 | ND | IGHV1-18 | IGHJ6 | IGKV3-20 | IGKJ2 | 2145 | AVLDYCSGGS | 3350 | QQYGRSPY | Xiaojian Han et al., 2020 |
| | | (Human) | (Human) | (Human) | (Human) | | SSSGYYNYGM | | T | (https://www.biorxiv.or |
| | | | | | | | DV | | | g/content/10.1101/202 |
| | | | | | | | | | | 0.08.19.253369v2.full.p |
| | | | | | | | | | | df+html) |
| Ab_511E5 | ND | IGHV1-2 | IGHJ2 | IGLV1-40 | IGLJ2 | 2146 | ARDSLFSRVD | 3351 | NSRDSSGN | Xiaojian Han et al., 2020 |
| | | (Human) | (Human) | (Human) | (Human) | | WYFDL | | TVV | (https://www.biorxiv.or |
| | | | | | | | | | | g/content/10.1101/202 |
| | | | | | | | | | | 0.08.19.253369v2.full.p |
| | | | | | | | | | | df+html) |
| Ab_511E7 | ND | IGHV5-51 | IGHJ4 | IGKV1-33 | IGKJ3 | 2147 | ALAVGRGIPT | 3352 | QQYHNLPI | Xiaojian Han et al., 2020 |
| | | (Human) | (Human) | (Human) | (Human) | | SYFDY | | T | (https://www.biorxiv.or |
| | | | | | | | | | | g/content/10.1101/202 |
| | | | | | | | | | | 0.08.19.253369v2.full.p |
| | | | | | | | | | | df+html) |
| Ab_511E9 | ND | IGHV1-18 | IGHJ4 | IGKV6-21 | IGKJ2 | 2148 | AREGAGLIIAY | 3353 | HQSSSLPY | Xiaojian Han et al., 2020 |
| | | (Human) | (Human) | (Human) | (Human) | | DY | | T | (https://www.biorxiv.or |
| | | | | | | | | | | g/content/10.1101/202 |
| | | | | | | | | | | 0.08.19.253369v2.full.p |
| | | | | | | | | | | df+html) |
| Ab_511G5 | ND | IGHV1-46 | IGHJ4 | IGLV1-47 | IGLJ3 | 2149 | ARDGALYSNS | 3354 | TTWDASR | Xiaojian Han et al., 2020 |
| | | (Human) | (Human) | (Human) | (Human) | | PTEFDY | | GGWV | (https://www.biorxiv.or |
| | | | | | | | | | | g/content/10.1101/202 |
| | | | | | | | | | | 0.08.19.253369v2.full.p |
| | | | | | | | | | | df+html) |
| Ab_511G7 | ND | IGHV3-33 | IGHJ4 | IGKV1-33 | IGKJ4 | 2150 | AKGGNYGDY | 3355 | QQYHNVP | Xiaojian Han et al., 2020 |
| | | (Human) | (Human) | (Human) | (Human) | | LRGFDY | | PA | (https://www.biorxiv.or |
| | | | | | | | | | | g/content/10.1101/202 |
| | | | | | | | | | | 0.08.19.253369v2.full.p |
| | | | | | | | | | | df+html) |
| Ab_511H11 | ND | IGHV3-33 | IGHJ6 | IGKV1-39 | IGKJ1 | 2151 | VRGDHSSGW | 3356 | QQSYSSPP | Xiaojian Han et al., 2020 |
| | | (Human) | (Human) | (Human) | (Human) | | YGTYYYYMDV | | WT | (https://www.biorxiv.or |
| | | | | | | | | | | g/content/10.1101/202 |
| | | | | | | | | | | 0.08.19.253369v2.full.p |
| | | | | | | | | | | df+html) |
| Ab_511H7 | ND | IGHV3-23 | IGHJ6 | IGLV1-47 | IGLJ3 | 2152 | ARGLQYYYDT | 3357 | AAWDDSL | Xiaojian Han et al., 2020 |
| | | (Human) | (Human) | (Human) | (Human) | | SGYYKDSYYY | | SGPV | (https://www.biorxiv.or |
| | | | | | | | GVDV | | | g/content/10.1101/202 |
| | | | | | | | | | | 0.08.19.253369v2.full.p |
| | | | | | | | | | | df+html) |
| Ab_51A1 | ND | IGHV3-66 | IGHJ3 | IGKV1-9 | IGKJ5 | 2153 | ARDLNIAGGF | 3358 | QHLNIDPIT | Xiaojian Han et al., 2020 |
| | | (Human) | (Human) | (Human) | (Human) | | DI | | | (https://www.biorxiv.or |
| | | | | | | | | | | g/content/10.1101/202 |
| | | | | | | | | | | 0.08.19.253369v2.full.p |
| | | | | | | | | | | df+html) |
| Ab_51A3 | ND | IGHV1-18 | IGHJ4 | IGKV3-11 | IGKJ5 | 2154 | ARDLAWFGE | 3359 | QQRGNSIT | Xiaojian Han et al., 2020 |
| | | (Human) | (Human) | (Human) | (Human) | | LSESPIEY | | | (https://www.biorxiv.or |
| | | | | | | | | | | g/content/10.1101/202 |
| | | | | | | | | | | 0.08.19.253369v2.full.p |
| | | | | | | | | | | df+html) |
| Ab_51D2 | ND | IGHV2-5 | IGHJ3 | IGKV1-39 | IGKJ4 | 2155 | AHRLAPDYDF | 3360 | QQSYNTLA | 0.08.19.253369v2.full.p |
| | | (Human) | (Human) | (Human) | (Human) | | LTGYYNGDD | | LS | Xiaojian Han et al., 2020 |
| | | | | | | | AFDV | | | (https://www.biorxiv.or |
| | | | | | | | | | | g/content/10.1101/202 |
| | | | | | | | | | | df+html) |

| | | | | | Not | | | | | |
|---|---|---|---|---|---|---|---|---|---|---|
| | Ab | | | Neutral- | Neutral- | | | SEQ | | SEQ |
| | or | | Doesn't | ising | ising | Protein + | | ID | | ID |
| Name | Nb | Binds to | Bind to | Vs | Vs | Epitope | Origin | NO.: | VH or VHH | NO.: |
| Ab_51D3 | Ab | SARS-CoV2 | | SARS-CoV2 | | S; RBD | B-cells; SARS-CoV2 | | ND | |
| | | | | (weak) | | | Human Patient | | | |
| Ab_51D4 | Ab | SARS-CoV2 | | SARS-CoV2 | | S; RBD | B-cells; SARS-CoV2 | | ND | |
| | | | | (weak) | | | Human Patient | | | |
| Ab_51D7 | Ab | SARS-CoV2 | | SARS-CoV2 | | S; RBD | B-cells; SARS-CoV2 | | ND | |
| | | | | (weak) | | | Human Patient | | | |
| Ab_51E10 | Ab | SARS-CoV2 | | SARS-CoV2 | | S; RBD | B-cells; SARS-CoV2 | | ND | |
| | | | | (weak) | | | Human Patient | | | |
| Ab_51E12 | Ab | SARS-CoV2 | | SARS-CoV2 | | S; RBD | B-cells; SARS-CoV2 | | ND | |
| | | | | | | | Human Patient | | | |
| Ab_51E7 | Ab | SARS-CoV2 | | SARS-CoV2 | | S; RBD | B-cells; SARS-CoV2 | | ND | |
| | | | | | | | Human Patient | | | |
| Ab_51F11 | Ab | SARS-CoV2 | | SARS-CoV2 | | S; RBD | B-cells; SARS-CoV2 | | ND | |
| | | | | | | | Human Patient | | | |
| Ab_52C1 | Ab | SARS-CoV2 | | | | S; RBD | B-cells; SARS-CoV2 | | ND | |
| | | | | | | | Human Patient | | | |
| Ab_52C6 | Ab | SARS-CoV2 | | SARS-CoV2 | | S; RBD | B-cells; SARS-CoV2 | | ND | |
| | | | | | | | Human Patient | | | |
| Ab_52F7 | Ab | SARS-CoV2 | | SARS-CoV2 | | S; RBD | B-cells; SARS-CoV2 | | ND | |
| | | | | (weak) | | | Human Patient | | | |
| Ab_52G9 | Ab | SARS-CoV2 | | SARS-CoV2 | | S; RBD | B-cells; SARS-CoV2 | | ND | |
| | | | | | | | Human Patient | | | |
| Ab_53C10 | Ab | SARS-CoV2 | | | | S; RBD | B-cells; SARS-CoV2 | | ND | |
| | | | | | | | Human Patient | | | |

| | | | | | | SEQ | | SEQ | | |
|---|---|---|---|---|---|---|---|---|---|---|
| | | Heavy V | Heavy J | Light V | Light J | ID | | ID | | |
| Name | VL | Gene | Gene | Gene | Gene | NO.: | CDRH3 | NO.: | CDRL3 | Sources |
| Ab_51D3 | ND | IGHV3-66 | (Human) | IGKV1-33 | IGKJ2 | 2156 | AREGLLVGPT | 3361 | QQYADLPY | Xiaojian Han et al., 2020 |
| | | (Human) | IGHJ6 | (Human) | (Human) | | GRGLGMDV | | T | (https://www.biorxiv.or |
| | | | | | | | | | | g/content/10.1101/202 |
| | | | | | | | | | | 0.08.19.253369v2.full.p |
| | | | | | | | | | | df+html) |
| Ab_51D4 | ND | IGHV2-70 | IGHJ4 | IGKV1-39 | IGKJ2 | 2157 | ARMVVRGV | 3362 | QQSYSPPH | Xiaojian Han et al., 2020 |
| | | (Human) | (Human) | (Human) | (Human) | | MLDY | | S | (https://www.biorxiv.or |
| | | | | | | | | | | g/content/10.1101/202 |
| | | | | | | | | | | 0.08.19.253369v2.full.p |
| | | | | | | | | | | df+html) |
| Ab_51D7 | ND | IGHV5-51 | IGHJ3 | IGKV1-39 | IGKJ2 | 2158 | ATRTGWTND | 3363 | QQSYSTPC | Xiaojian Han et al., 2020 |
| | | (Human) | (Human) | (Human) | (Human) | | AFDI | | T | (https://www.biorxiv.or |
| | | | | | | | | | | g/content/10.1101/202 |
| | | | | | | | | | | 0.08.19.253369v2.full.p |
| | | | | | | | | | | df+html) |
| Ab_51E10 | ND | IGHV1-18 | IGHJ2 | IGKV4-1 | IGKJ4 | 2159 | ARARQLVLN | 3364 | QQYYITPQ | Xiaojian Han et al., 2020 |
| | | (Human) | (Human) | (Human) | (Human) | | WYFDL | | LT | (https://www.biorxiv.or |
| | | | | | | | | | | g/content/10.1101/202 |
| | | | | | | | | | | 0.08.19.253369v2.full.p |
| | | | | | | | | | | df+html) |
| Ab_51E12 | ND | IGHV3-7 | IGHJ4 | IGKV1-8 | IGKJ2 | 2160 | ARLMYYYGNF | 3365 | QQYYGYPT | Xiaojian Han et al., 2020 |
| | | (Human) | (Human) | (Human) | (Human) | | DY | | | (https://www.biorxiv.or |
| | | | | | | | | | | g/content/10.1101/202 |
| | | | | | | | | | | 0.08.19.253369v2.full.p |
| | | | | | | | | | | df+html) |
| Ab_51E7 | ND | IGHV3-13 | IGHJ2 | IGKV1-39 | IGKJ1 | 2161 | ARVGYYGSGS | 3366 | QQSYSAPP | Xiaojian Han et al., 2020 |
| | | (Human) | (Human) | (Human) | (Human) | | YPLYWYFDL | | WT | (https://www.biorxiv.or |
| | | | | | | | | | | g/content/10.1101/202 |
| | | | | | | | | | | 0.08.19.253369v2.full.p |
| | | | | | | | | | | df+html) |
| Ab_51F11 | ND | IGHV1-69 | IGHJ4 | IGKV3-20 | IGKJ2 | 2162 | ATGRYTYGYG | 3367 | QQYGSSRT | Xiaojian Han et al., 2020 |
| | | (Human) | (Human) | (Human) | (Human) | | YYFDY | | | (https://www.biorxiv.or |
| | | | | | | | | | | g/content/10.1101/202 |
| | | | | | | | | | | 0.08.19.253369v2.full.p |
| | | | | | | | | | | df+html) |
| Ab_52C1 | ND | IGHV3-66 | IGHJ4 | IGLV1-40 | IGLJ3 | 2163 | ARLASDGSGS | 3368 | QSYDSSLS | Xiaojian Han et al., 2020 |
| | | (Human) | (Human) | (Human) | (Human) | | YLDYFDY | | GSWV | (https://www.biorxiv.or |
| | | | | | | | | | | g/content/10.1101/202 |
| | | | | | | | | | | 0.08.19.253369v2.full.p |
| | | | | | | | | | | df+html) |
| Ab_52C6 | ND | IGHV1-69 | IGHJ6 | IGLV8-61 | IGLJ2 | 2164 | ATDGGGGSY | 3369 | VLYMGSGI | Xiaojian Han et al., 2020 |
| | | (Human) | (Human) | (Human) | (Human) | | YYAHYYYGM | | VV | (https://www.biorxiv.or |
| | | | | | | | DV | | | g/content/10.1101/202 |
| | | | | | | | | | | 0.08.19.253369v2.full.p |
| | | | | | | | | | | df+html) |
| Ab_52F7 | ND | IGHV3-9 | IGHJ6 | IGKV2D-30 | IGKJ2 | 2165 | AKDIGVMVP | 3370 | MQGTHW | Xiaojian Han et al., 2020 |
| | | (Human) | (Human) | (Human) | (Human) | | GVTPYGMDV | | PPGT | (https://www.biorxiv.or |
| | | | | | | | | | | g/content/10.1101/202 |
| | | | | | | | | | | 0.08.19.253369v2.full.p |
| | | | | | | | | | | df+html) |
| Ab_52G9 | ND | IGHV3-66 | IGHJ6 | IGKV1-33 | IGKJ1 | 2166 | ARDPMRPG | 3371 | QQYDNLP | Xiaojian Han et al., 2020 |
| | | (Human) | (Human) | (Human) | (Human) | | MDV | | RT | (https://www.biorxiv.or |
| | | | | | | | | | | g/content/10.1101/202 |
| | | | | | | | | | | 0.08.19.253369v2.full.p |
| | | | | | | | | | | df+html) |
| Ab_53C10 | ND | IGHV3-43 | IGHJ4 | IGLV3-21 | IGLJ1 | 2167 | ARESPKLTGY | 3372 | QVWDSSS | Xiaojian Han et al., 2020 |
| | | (Human) | (Human) | (Human) | (Human) | | FDY | | DPYV | (https://www.biorxiv.or |
| | | | | | | | | | | g/content/10.1101/202 |
| | | | | | | | | | | 0.08.19.253369v2.full.p |
| | | | | | | | | | | df+html) |

| | | | | | Not | | | | | |
|---|---|---|---|---|---|---|---|---|---|---|
| | Ab | | | Neutral- | Neutral- | | | SEQ | | SEQ |
| | or | | Doesn't | ising | ising | Protein + | | ID | | ID |
| Name | Nb | Binds to | Bind to | Vs | Vs | Epitope | Origin | NO.: | VH or VHH | NO.: |
| Ab_53C5 | Ab | SARS-CoV2 | | | | S; RBD | B-cells; SARS-CoV2 | | ND | |
| | | | | | | | Human Patient | | | |
| Ab_53F12 | Ab | SARS-CoV2 | | SARS-CoV2 | | S; RBD | B-cells; SARS-CoV2 | | ND | |
| | | | | (weak) | | | Human Patient | | | |
| Ab_53F9 | Ab | SARS-CoV2 | | | | S; RBD | B-cells; SARS-CoV2 | | ND | |
| | | | | | | | Human Patient | | | |
| Ab_53H3 | Ab | SARS-CoV2 | | SARS-CoV2 | | S; RBD | B-cells; SARS-CoV2 | | ND | |
| | | | | (weak) | | | Human Patient | | | |
| Ab_55A8 | Ab | SARS-CoV2 | | SARS-CoV2 | | S; RBD | B-cells; SARS-CoV2 | | ND | |
| | | | | (weak) | | | Human Patient | | | |
| Ab_55C9 | Ab | SARS-CoV2 | | SARS-CoV2 | | S; RBD | B-cells; SARS-CoV2 | | ND | |
| | | | | (weak) | | | Human Patient | | | |
| Ab_56C12 | Ab | SARS-CoV2 | | SARS-CoV2 | | S; RBD | B-cells; SARS-CoV2 | | ND | |
| | | | | | | | Human Patient | | | |
| Ab_56D7 | Ab | SARS-CoV2 | | SARS-CoV2 | | S; RBD | B-cells; SARS-CoV2 | | ND | |
| | | | | (weak) | | | Human Patient | | | |
| Ab_56E1 | Ab | SARS-CoV2 | | SARS-CoV2 | | S; RBD | B-cells; SARS-CoV2 | | ND | |
| | | | | | | | Human Patient | | | |
| Ab_56H11 | Ab | SARS-CoV2 | | | | S; RBD | B-cells; SARS-CoV2 | | ND | |
| | | | | | | | Human Patient | | | |
| Ab_56H3 | Ab | SARS-CoV2 | | SARS-CoV2 | | S; RBD | B-cells; SARS-CoV2 | | ND | |
| | | | | | | | Human Patient | | | |
| Ab_57A6 | Ab | SARS-CoV2 | | SARS-CoV2 | | S; RBD | B-cells; SARS-CoV2 | | ND | |
| | | | | | | | Human Patient | | | |

| | | | | | | SEQ | | SEQ | | |
|---|---|---|---|---|---|---|---|---|---|---|
| | | Heavy V | Heavy J | Light V | Light J | ID | | ID | | |
| Name | VL | Gene | Gene | Gene | Gene | NO.: | CDRH3 | NO.: | CDRL3 | Sources |
| Ab_53C5 | ND | IGHV1-69 | IGHJ4 | IGKV1-5 | IGKJ2 | 2168 | ARGRYTYGTE | 3373 | QQYNNLYT | Xiaojian Han et al., 2020 |
| | | (Human) | (Human) | (Human) | (Human) | | GYFDN | | | (https://www.biorxiv.or |
| | | | | | | | | | | g/content/10.1101/202 |
| | | | | | | | | | | 0.08.19.253369v2.full.p |
| | | | | | | | | | | df+html) |
| Ab_53F12 | ND | IGHV3-66 | IGHJ6 | IGKV3-15 | IGKJ2 | 2169 | ARDAVGSYYY | 3374 | QHYNNWP | Xiaojian Han et al., 2020 |
| | | (Human) | (Human) | (Human) | (Human) | | GMEV | | LYT | (https://www.biorxiv.or |
| | | | | | | | | | | g/content/10.1101/202 |
| | | | | | | | | | | 0.08.19.253369v2.full.p |
| | | | | | | | | | | df+html) |
| Ab_53F9 | ND | IGHV3-53 | IGHJ4 | IGKV2D-30 | IGKJ2 | 2170 | AREGLVGTTL | 3375 | MQGTHW | Xiaojian Han et al., 2020 |
| | | (Human) | (Human) | (Human) | (Human) | | TEDY | | PPGT | (https://www.biorxiv.or |
| | | | | | | | | | | g/content/10.1101/202 |
| | | | | | | | | | | 0.08.19.253369v2.full.p |
| | | | | | | | | | | df+html) |
| Ab_53H3 | ND | IGHV3-66 | IGHJ3 | IGKV1-33 | IGKJ3 | 2171 | ARYYGPQGR | 3376 | QQYDNLPL | Xiaojian Han et al., 2020 |
| | | (Human) | (Human) | (Human) | (Human) | | AFDI | | T | (https://www.biorxiv.or |
| | | | | | | | | | | g/content/10.1101/202 |
| | | | | | | | | | | 0.08.19.253369v2.full.p |
| | | | | | | | | | | df+html) |
| Ab_55A8 | ND | IGHV1-69 | IGHJ4 | IGKV1-5 | IGKJ2 | 2172 | ARGTEYGDYD | 3377 | QQYNSYSH | Xiaojian Han et al., 2020 |
| | | (Human) | (Human) | (Human) | (Human) | | VSHD | | T | (https://www.biorxiv.or |
| | | | | | | | | | | g/content/10.1101/202 |
| | | | | | | | | | | 0.08.19.253369v2.full.p |
| | | | | | | | | | | df+html) |
| Ab_55C9 | ND | IGHV3-53 | IGHJ4 | IGKV1-39 | IGKJ2 | 2173 | AREGLVGTAL | 3378 | QQSYSTPP | Xiaojian Han et al., 2020 |
| | | (Human) | (Human) | (Human) | (Human) | | AFDY | | YT | (https://www.biorxiv.or |
| | | | | | | | | | | g/content/10.1101/202 |
| | | | | | | | | | | 0.08.19.253369v2.full.p |
| | | | | | | | | | | df+html) |
| Ab_56C12 | ND | IGHV3-30 | IGHJ5 | IGKV1-39 | IGKJ1 | 2174 | AKDPTSLYCS | 3379 | QQTYSTPR | Xiaojian Han et al., 2020 |
| | | (Human) | (Human) | (Human) | (Human) | | GGSCYNNWF | | T | (https://www.biorxiv.or |
| | | | | | | | DP | | | g/content/10.1101/202 |
| | | | | | | | | | | 0.08.19.253369v2.full.p |
| | | | | | | | | | | df+html) |
| Ab_56D7 | ND | IGHV3-66 | IGHJ6 | IGKV1-9 | IGKJ5 | 2175 | ARDLDYYGM | 3380 | QQLNSYPP | Xiaojian Han et al., 2020 |
| | | (Human) | (Human) | (Human) | (Human) | | DV | | IT | (https://www.biorxiv.or |
| | | | | | | | | | | g/content/10.1101/202 |
| | | | | | | | | | | 0.08.19.253369v2.full.p |
| | | | | | | | | | | df+html) |
| Ab_56E1 | ND | IGHV3-30 | IGHJ3 | IGLV1-44 | IGLJ3 | 2176 | AGGGVLVTS | 3381 | AAWDDSL | Xiaojian Han et al., 2020 |
| | | (Human) | (Human) | (Human) | (Human) | | DPDAFDI | | NGWV | (https://www.biorxiv.or |
| | | | | | | | | | | g/content/10.1101/202 |
| | | | | | | | | | | 0.08.19.253369v2.full.p |
| | | | | | | | | | | df+html) |
| Ab_56H11 | ND | IGHV4-4 | IGHJ4 | IGLV1-44 | IGLJ3 | 2177 | AGEQHIVTTII | 3382 | ATWDDSL | Xiaojian Han et al., 2020 |
| | | (Human) | (Human) | (Human) | (Human) | | DY | | NGRV | (https://www.biorxiv.or |
| | | | | | | | | | | g/content/10.1101/202 |
| | | | | | | | | | | 0.08.19.253369v2.full.p |
| | | | | | | | | | | df+html) |
| Ab_56H3 | ND | IGHV3-66 | IGHJ4 | IGKV3-20 | IGKJ1 | 2178 | ARDYGDYYFD | 3383 | QQYGSSPR | Xiaojian Han et al., 2020 |
| | | (Human) | (Human) | (Human) | (Human) | | Y | | T | (https://www.biorxiv.or |
| | | | | | | | | | | g/content/10.1101/202 |
| | | | | | | | | | | 0.08.19.253369v2.full.p |
| | | | | | | | | | | df+html) |
| Ab_57A6 | ND | IGHV5-51 | IGHJ4 | IGLV3-19 | IGLJ3 | 2179 | ARQESGWSF | 3384 | NSRDSSGN | Xiaojian Han et al., 2020 |
| | | (Human) | (Human) | (Human) | (Human) | | DY | | HWV | (https://www.biorxiv.or |
| | | | | | | | | | | g/content/10.1101/202 |
| | | | | | | | | | | 0.08.19.253369v2.full.p |
| | | | | | | | | | | df+html) |

| | | | | | Not | | | | | |
|---|---|---|---|---|---|---|---|---|---|---|
| | Ab | | | Neutral- | Neutral- | | | SEQ | | SEQ |
| | or | | Doesn't | ising | ising | Protein + | | ID | | ID |
| Name | Nb | Binds to | Bind to | Vs | Vs | Epitope | Origin | NO.: | VH or VHH | NO.: |
| Ab_57A8 | Ab | SARS-CoV2 | | SARS-CoV2 | | S; RBD | B-cells; SARS-CoV2 | | ND | |
| | | | | | | | Human Patient | | | |
| Ab_57A9 | Ab | SARS-CoV2 | | SARS-CoV2 | | S; RBD | B-cells; SARS-CoV2 | | ND | |
| | | | | | | | Human Patient | | | |
| Ab_57B8 | Ab | SARS-CoV2 | | SARS-CoV2 | | S; RBD | B-cells; SARS-CoV2 | | ND | |
| | | | | (weak) | | | Human Patient | | | |
| Ab_57C4 | Ab | SARS-CoV2 | | SARS-CoV2 | | S; RBD | B-cells; SARS-CoV2 | | ND | |
| | | | | | | | Human Patient | | | |
| Ab_57E11 | Ab | SARS-CoV2 | | SARS-CoV2 | | S; RBD | B-cells; SARS-CoV2 | | ND | |
| | | | | | | | Human Patient | | | |
| Ab_57F7 | Ab | SARS-CoV2 | | SARS-CoV2 | | S; RBD | B-cells; SARS-CoV2 | | ND | |
| | | | | (weak) | | | Human Patient | | | |
| Ab_57G9 | Ab | SARS-CoV2 | | SARS-CoV2 | | S; RBD | B-cells; SARS-CoV2 | | ND | |
| | | | | | | | Human Patient | | | |
| Ab_58A4 | Ab | SARS-CoV2 | | | | S; RBD | B-cells; SARS-CoV2 | | ND | |
| | | | | | | | Human Patient | | | |
| Ab_58D2 | Ab | SARS-CoV2 | | | | S; RBD | B-cells; SARS-CoV2 | | ND | |
| | | | | | | | Human Patient | | | |
| Ab_58G1 | Ab | SARS-CoV2 | | SARS-CoV2 | | S; RBD | B-cells; SARS-CoV2 | | ND | |
| | | | | | | | Human Patient | | | |
| Ab_58G6 | Ab | SARS-CoV2 | | | SARS-CoV2 | S; RBD | B-cells; SARS-CoV2 | | ND | |
| | | | | | | | Human Patient | | | |
| Ab_59A2 | Ab | SARS-CoV2 | | | | S; RBD | B-cells; SARS-CoV2 | | ND | |
| | | | | | | | Human Patient | | | |

| | | | | | | SEQ | | SEQ | | |
|---|---|---|---|---|---|---|---|---|---|---|
| | | Heavy V | Heavy J | Light V | Light J | ID | | ID | | |
| Name | VL | Gene | Gene | Gene | Gene | NO.: | CDRH3 | NO.: | CDRL3 | Sources |
| Ab_57A8 | ND | IGHV3-23 | IGHJ4 | IGKV1-5 | IGKJ4 | 2180 | AKGQRGSPD | 3385 | QQYNSYSP | Xiaojian Han et al., 2020 |
| | | (Human) | (Human) | (Human) | (Human) | | FFDY | | LT | (https://www.biorxiv.or |
| | | | | | | | | | | g/content/10.1101/202 |
| | | | | | | | | | | 0.08.19.253369v2.full.p |
| | | | | | | | | | | df+html) |
| Ab_57A9 | ND | IGHV1-3 | IGHJ4 | IGKV4-1 | IGKJ1 | 2181 | ARAGWELNY | 3386 | QQYYSFW | Xiaojian Han et al., 2020 |
| | | (Human) | (Human) | (Human) | (Human) | | | | A | (https://www.biorxiv.or |
| | | | | | | | | | | g/content/10.1101/202 |
| | | | | | | | | | | 0.08.19.253369v2.full.p |
| | | | | | | | | | | df+html) |
| Ab_57B8 | ND | IGHV3-53 | IGHJ4 | IGKV1-9 | IGKJ5 | 2182 | ARDLVTWGL | 3387 | QLLNTDPI | Xiaojian Han et al., 2020 |
| | | (Human) | (Human) | (Human) | (Human) | | DY | | T | (https://www.biorxiv.or |
| | | | | | | | | | | g/content/10.1101/202 |
| | | | | | | | | | | 0.08.19.253369v2.full.p |
| | | | | | | | | | | df+html) |
| Ab_57C4 | ND | IGHV3-15 | IGHJ5 | IGKV1-39 | IGKJ4 | 2183 | STTNDYGDYS | 3388 | QQSYSTPL | Xiaojian Han et al., 2020 |
| | | (Human) | (Human) | (Human) | (Human) | | ANY | | T | (https://www.biorxiv.or |
| | | | | | | | | | | g/content/10.1101/202 |
| | | | | | | | | | | 0.08.19.253369v2.full.p |
| | | | | | | | | | | df+html) |
| Ab_57E11 | ND | IGHV1-8 | IGHJ5 | IGLV1-44 | IGLJ3 | 2184 | ARGLWFGDL | 3389 | AAWDDSL | Xiaojian Han et al., 2020 |
| | | (Human) | (Human) | (Human) | (Human) | | TRTKYNWFD | | NGWV | (https://www.biorxiv.or |
| | | | | | | | P | | | g/content/10.1101/202 |
| | | | | | | | | | | 0.08.19.253369v2.full.p |
| | | | | | | | | | | df+html) |
| Ab_57F7 | ND | IGHV4-34 | IGHJ6 | IGLV1-44 | IGLJ3 | 2185 | ARDDSSSSGV | 3390 | AVWDDSL | Xiaojian Han et al., 2020 |
| | | (Human) | (Human) | (Human) | (Human) | | GTGMDV | | NGWV | (https://www.biorxiv.or |
| | | | | | | | | | | g/content/10.1101/202 |
| | | | | | | | | | | 0.08.19.253369v2.full.p |
| | | | | | | | | | | df+html) |
| Ab_57G9 | ND | IGHV2-70 | IGHJ4 | IGKV1-39 | IGKJ2 | 2186 | ARITPHLVYDY | 3391 | QQSYSIPR | Xiaojian Han et al., 2020 |
| | | (Human) | (Human) | (Human) | (Human) | | | | T | (https://www.biorxiv.or |
| | | | | | | | | | | g/content/10.1101/202 |
| | | | | | | | | | | 0.08.19.253369v2.full.p |
| | | | | | | | | | | df+html) |
| Ab_58A4 | ND | IGHV4-59 | IGHJ5 | IGKV3-20 | IGKJ1 | 2187 | ARTLGAYYDIL | 3392 | QQYGSSP | Xiaojian Han et al., 2020 |
| | | (Human) | (Human) | (Human) | (Human) | | TGFRTPGGW | | WT | (https://www.biorxiv.or |
| | | | | | | | FAP | | | g/content/10.1101/202 |
| | | | | | | | | | | 0.08.19.253369v2.full.p |
| | | | | | | | | | | df+html) |
| Ab_58D2 | ND | IGHV3-11 | IGHJ2 | IGKV3-11 | IGKJ2 | 2188 | ASPLLSHNYG | 3393 | QQLGT | Xiaojian Han et al., 2020 |
| | | (Human) | (Human) | (Human) | (Human) | | SGSYYNVYWY | | | (https://www.biorxiv.or |
| | | | | | | | FEL | | | g/content/10.1101/202 |
| | | | | | | | | | | 0.08.19.253369v2.full.p |
| | | | | | | | | | | df+html) |
| Ab_58G1 | ND | IGHV3-53 | IGHJ6 | IGKV1D-12 | IGKJ4 | 2189 | ARDLENGGL | 3394 | QQTNSFPT | Xiaojian Han et al., 2020 |
| | | (Human) | (Human) | (Human) | (Human) | | DV | | | (https://www.biorxiv.or |
| | | | | | | | | | | g/content/10.1101/202 |
| | | | | | | | | | | 0.08.19.253369v2.full.p |
| | | | | | | | | | | df+html) |
| Ab_58G6 | ND | IGHV1-58 | IGHJ3 | IGKV3-20 | IGKJ1 | 2190 | AAPNCNSTTC | 3395 | QQYDNSP | Xiaojian Han et al., 2020 |
| | | (Human) | (Human) | (Human) | (Human) | | HDGFDI | | WT | (https://www.biorxiv.or |
| | | | | | | | | | | g/content/10.1101/202 |
| | | | | | | | | | | 0.08.19.253369v2.full.p |
| | | | | | | | | | | df+html) |
| Ab_59A2 | ND | IGHV3-66 | IGHJ4 | IGKV1-33 | IGKJ3 | 2191 | ARDLPLHGDY | 3396 | QQSDNVP | Xiaojian Han et al., 2020 |
| | | (Human) | (Human) | (Human) | (Human) | | FDY | | VT | (https://www.biorxiv.or |
| | | | | | | | | | | g/content/10.1101/202 |
| | | | | | | | | | | 0.08.19.253369v2.full.p |
| | | | | | | | | | | df+html) |

| | | | | | Not | | | | | |
|---|---|---|---|---|---|---|---|---|---|---|
| | Ab | | | Neutral- | Neutral- | | | SEQ | | SEQ |
| | or | | Doesn't | ising | ising | Protein + | | ID | | ID |
| Name | Nb | Binds to | Bind to | Vs | Vs | Epitope | Origin | NO.: | VH or VHH | NO.: |
| Ab_59D6 | Ab | SARS-CoV2 | | | | S; RBD | B-cells; SARS-CoV2 | | ND | |
| | | | | | | | Human Patient | | | |
| Ab_81A11 | Ab | SARS-CoV2 | | | | S; RBD | B-cells; SARS-CoV2 | | ND | |
| | | | | | | | Human Patient | | | |
| Ab_81C3 | Ab | SARS-CoV2 | | SARS-CoV2 | | S; RBD | B-cells; SARS-CoV2 | | ND | |
| | | | | (weak) | | | Human Patient | | | |
| Ab_81C7 | Ab | SARS-CoV2 | | | | S; RBD | B-cells; SARS-CoV2 | | ND | |
| | | | | | | | Human Patient | | | |
| Ab_81C8 | Ab | SARS-CoV2 | | SARS-CoV2 | | S; RBD | B-cells; SARS-CoV2 | | ND | |
| | | | | | | | Human Patient | | | |
| Ab_81E1 | Ab | SARS-CoV2 | | SARS-CoV2 | | S; RBD | B-cells; SARS-CoV2 | | ND | |
| | | | | (weak) | | | Human Patient | | | |
| Ab_81E10 | Ab | SARS-CoV2 | | | | S; RBD | B-cells; SARS-CoV2 | | ND | |
| | | | | | | | Human Patient | | | |
| Ab_81F2 | Ab | SARS-CoV2 | | | | S; RBD | B-cells; SARS-CoV2 | | ND | |
| | | | | | | | Human Patient | | | |
| Ab_82B6 | Ab | SARS-CoV2 | | | | S; RBD | B-cells; SARS-CoV2 | | ND | |
| | | | | | | | Human Patient | | | |
| Ab_82C6 | Ab | SARS-CoV2 | | | | S; RBD | B-cells; SARS-CoV2 | | ND | |
| | | | | | | | Human Patient | | | |
| Ab_82F6 | Ab | SARS-CoV2 | | SARS-CoV2 | | S; RBD | B-cells; SARS-CoV2 | | ND | |
| | | | | | | | Human Patient | | | |
| Acharya | Ab | HIV | | | | S Glycans | B-cells; HIV Human | | Various | |
| et al., | | Glycans, | | | | | Patient | | | |
| 2020 | | SARS-CoV2 | | | | | | | | |
| | | Glycans | | | | | | | | |

| | | | | | | SEQ | | SEQ | | |
|---|---|---|---|---|---|---|---|---|---|---|
| | | Heavy V | Heavy J | Light V | Light J | ID | | ID | | |
| Name | VL | Gene | Gene | Gene | Gene | NO.: | CDRH3 | NO.: | CDRL3 | Sources |
| Ab_59D6 | ND | IGHV4-34 | IGHJ4 | IGLV1-40 | IGLJ2 | 2192 | ARHRRDYITM | 3397 | QSYDSALV | Xiaojian Han et al., 2020 |
| | | (Human) | (Human) | (Human) | (Human) | | IVRPTRLWAF | | V | (https://www.biorxiv.or |
| | | | | | | | DY | | | g/content/10.1101/202 |
| | | | | | | | | | | 0.08.19.253369v2.full.p |
| | | | | | | | | | | df+html) |
| Ab_81A11 | ND | IGHV1-69 | IGHJ2 | IGLV1-40 | IGLJ2 | 2193 | AREAGTTDW | 3398 | QSYDSSLS | Xiaojian Han et al., 2020 |
| | | (Human) | (Human) | (Human) | (Human) | | YFDL | | VVV | (https://www.biorxiv.or |
| | | | | | | | | | | g/content/10.1101/202 |
| | | | | | | | | | | 0.08.19.253369v2.full.p |
| | | | | | | | | | | df+html) |
| Ab_81C3 | ND | IGHV4-39 | IGHJ4 | IGLV2-14 | IGLJ1 | 2194 | ARHPRFSWR | 3399 | SSFTSSSTP | Xiaojian Han et al., 2020 |
| | | (Human) | (Human) | (Human) | (Human) | | GNDSGYFDY | | YV | (https://www.biorxiv.or |
| | | | | | | | | | | g/content/10.1101/202 |
| | | | | | | | | | | 0.08.19.253369v2.full.p |
| | | | | | | | | | | df+html) |
| Ab_81C7 | ND | IGHV2-5 | IGHJ4 | IGLV1-36 | IGLJ3 | 2195 | AHSMVRGVL | 3400 | AAWDDSL | Xiaojian Han et al., 2020 |
| | | (Human) | (Human) | (Human) | (Human) | | FGADFDY | | NGPV | (https://www.biorxiv.or |
| | | | | | | | | | | g/content/10.1101/202 |
| | | | | | | | | | | 0.08.19.253369v2.full.p |
| | | | | | | | | | | df+html) |
| Ab_81C8 | ND | IGHV3-33 | IGHJ4 | IGKV1-39 | IGKJ1 | 2196 | ARDGVDFGM | 3401 | QQSYNTPP | Xiaojian Han et al., 2020 |
| | | (Human) | (Human) | (Human) | (Human) | | VTLFDY | | WT | (https://www.biorxiv.or |
| | | | | | | | | | | g/content/10.1101/202 |
| | | | | | | | | | | 0.08.19.253369v2.full.p |
| | | | | | | | | | | df+html) |
| Ab_81E1 | ND | IGHV1-24 | IGHJ4 | IGLV1-47 | IGLJ2 | 2197 | AITSVARGLR | 3402 | AAWDDSL | Xiaojian Han et al., 2020 |
| | | (Human) | (Human) | (Human) | (Human) | | GYFDT | | SRVV | (https://www.biorxiv.or |
| | | | | | | | | | | g/content/10.1101/202 |
| | | | | | | | | | | 0.08.19.253369v2.full.p |
| | | | | | | | | | | df+html) |
| Ab_81E10 | ND | IGHV1-24 | IGHJ4 | IGLV1-47 | IGLJ2 | 2198 | AITSLARGLKG | 3403 | AAWDDSL | Xiaojian Han et al., 2020 |
| | | (Human) | (Human) | (Human) | (Human) | | YFDS | | SGVI | (https://www.biorxiv.or |
| | | | | | | | | | | g/content/10.1101/202 |
| | | | | | | | | | | 0.08.19.253369v2.full.p |
| | | | | | | | | | | df+html) |
| Ab_81F2 | ND | IGHV4-34 | IGHJ5 | IGKV2-28 | IGKJ4 | 2199 | ARGWTVPPL | 3404 | MQALQTP | Xiaojian Han et al., 2020 |
| | | (Human) | (Human) | (Human) | (Human) | | WVLNWFDP | | RT | (https://www.biorxiv.or |
| | | | | | | | | | | g/content/10.1101/202 |
| | | | | | | | | | | 0.08.19.253369v2.full.p |
| | | | | | | | | | | df+html) |
| Ab_82B6 | ND | IGHV4-61 | IGHJ5 | IGKV2-30 | IGKJ1 | 2200 | AMTYYDYIW | 3405 | CMQGTH | Xiaojian Han et al., 2020 |
| | | (Human) | (Human) | (Human) | (Human) | | GRVDPQFDP | | WPPT | (https://www.biorxiv.or |
| | | | | | | | | | | g/content/10.1101/202 |
| | | | | | | | | | | 0.08.19.253369v2.full.p |
| | | | | | | | | | | df+html) |
| Ab_82C6 | ND | IGHV4-39 | IGHJ4 | IGKV2-30 | IGKJ2 | 2201 | ARFITDGYSS | 3406 | MQGTHW | Xiaojian Han et al., 2020 |
| | | (Human) | (Human) | (Human) | (Human) | | GSDS | | PMYT | (https://www.biorxiv.or |
| | | | | | | | | | | g/content/10.1101/202 |
| | | | | | | | | | | 0.08.19.253369v2.full.p |
| | | | | | | | | | | df+html) |
| Ab_82F6 | ND | IGHV3-30 | IGHJ4 | IGKV1-33 | IGKJ4 | 2202 | AKQASPYCSG | 3407 | QQHDNVP | Xiaojian Han et al., 2020 |
| | | (Human) | (Human) | (Human) | (Human) | | GSCYSGNFDY | | LT | (https://www.biorxiv.or |
| | | | | | | | | | | g/content/10.1101/202 |
| | | | | | | | | | | 0.08.19.253369v2.full.p |
| | | | | | | | | | | df+html) |
| Acharya | Various | Various | Various | Various | Various | | Various | | Various | Priyamvada Acharya et |
| et al., | | | | | | | | | | al., 2020 |
| 2020 | | | | | | | | | | (https://www.biorxiv.or |
| | | | | | | | | | | g/content/10.1101/202 |
| | | | | | | | | | | 0.06.30.178897v1); Wilt |
| | | | | | | | | | | on Williams et al., 2020 |
| | | | | | | | | | | (https://www.biorxiv.or |
| | | | | | | | | | | g/content/10.1101/202 |
| | | | | | | | | | | 0.06.30.178921v1) |

| | | | | | Not | | | | | |
|---|---|---|---|---|---|---|---|---|---|---|
| | Ab | | | Neutral- | Neutral- | | | SEQ | | SEQ |
| | or | | Doesn't | ising | ising | Protein + | | ID | | ID |
| Name | Nb | Binds to | Bind to | Vs | Vs | Epitope | Origin | NO.: | VH or VHH | NO.: |
| B38 | Ab | SARS-CoV2 | | SARS-CoV2 | | S; RBD | B-cells; SARS-CoV2 | 124 | EVQLVESGGGLVQPGGSLRLSCAASGFI | 1206 |
| | | | | | | | Human Patient | | VSSNYMSWVRQAPGKGLEWVSVIYSG | |
| | | | | | | | | | GSTYYADSVKGRFTISRHNSKNTLYLQM | |
| | | | | | | | | | NSLRAEDTAVYYCAREAYGMDVWGQG | |
| | | | | | | | | | TTVTVSS | |
| BD-236 | Ab | SARS-CoV2 | | SARS-CoV2 | | S; RBD | B-cells; SARS-CoV2 | 125 | EVQLVESGGGLIQPGGSLRLSCAASGITV | |
| | | | | | | | Human Patient | | SSNYMSWVRQAPGKGLEWVSVIYSGG | |
| | | | | | | | | | STDYADSVKGRFTISRDKSKNTLYLQMN | |
| | | | | | | | | | SLRAEDTAVYYCARDLGEAGGMDVWG | |
| | | | | | | | | | QGTTVTVSS | |
| BD-368-2 | Ab | SARS-CoV2 | | SARS-CoV2 | | S; RBD | B-cells; SARS-CoV2 | | ND | |
| | | | | | | | Human Patient | | | |
| BD-494 | Ab | SARS-CoV2 | | SARS-CoV2 | | S; | Phage Display | | ND | |
| | | | | | | probably | Library (Antibody, | | | |
| | | | | | | RBD | human, immune- | | | |
| | | | | | | (implied | CoV2) | | | |
| | | | | | | by | | | | |
| | | | | | | clustering) | | | | |
| BD-498 | Ab | SARS-CoV2 | | SARS-CoV2 | | S; | Phage Display | | ND | |
| | | | | | | probably | Library (Antibody, | | | |
| | | | | | | RBD | human, immune- | | | |
| | | | | | | (implied | CoV2) | | | |
| | | | | | | by | | | | |
| | | | | | | clustering) | | | | |
| BD-500 | Ab | SARS-CoV2 | | SARS-CoV2 | | S; | B-cells; SARS-CoV2 | | ND | |
| | | | | | | probably | Human Patient | | | |
| | | | | | | RBD | | | | |
| | | | | | | (implied | | | | |
| | | | | | | by | | | | |
| | | | | | | custering) | | | | |
| BD-503 | Ab | SARS-CoV2 | | SARS-CoV2 | | S; RBD | B-cells; SARS-CoV2 | | ND | |
| | | | | | | | Human Patient | | | |
| BD-504 | Ab | SARS-CoV2 | | SARS-CoV2 | | S; RBD | B-cells; SARS-CoV2 | | ND | |
| | | | | | | | Human Patient | | | |
| BD-505 | Ab | SARS-CoV2 | | SARS-CoV2 | | S; RBD | B-cells; SARS-CoV2 | | ND | |
| | | | | | | | Human Patient | | | |
| BD-506 | Ab | SARS-CoV2 | | SARS-CoV2 | | S; RBD | B-cells; SARS-CoV2 | | ND | |
| | | | | | | | Human Patient | | | |
| BD-507 | Ab | SARS-CoV2 | | SARS-CoV2 | | S; RBD | B-cells; SARS-CoV2 | | ND | |
| | | | | | | | Human Patient | | | |
| BD-508 | Ab | SARS-CoV2 | | SARS-CoV2 | | S; RBD | B-cells; SARS-CoV2 | | ND | |
| | | | | | | | Human Patient | | | |
| BD-515 | Ab | SARS-CoV2 | | SARS-CoV2 | | S; RBD | B-cells; SARS-CoV2 | | ND | |
| | | | | | | | Human Patient | | | |

| | | | | | | SEQ | | SEQ | | |
|---|---|---|---|---|---|---|---|---|---|---|
| | | Heavy V | Heavy J | Light V | Light J | ID | | ID | | |
| Name | VL | Gene | Gene | Gene | Gene | NO.: | CDRH3 | NO.: | CDRL3 | Sources |
| B38 | DIVMTQSPSFLSASVGDRVTITCRASQ | IGHV3-53 | IGHJ6 | IGKV1-9 | IGKJ2 | 2203 | AREAYGMDV | 3408 | QQLNSYPP | Yan Wu et al., 2020 |
| | GISSYLAWYQQKPGKAPKLLIYAASTL | (Human) | (Human) | (Human) | (Human) | | | | YT | (https://science.science |
| | QSGVPSRFSGSGSGTEFTLTISSLQPED | | | | | | | | | mag.org/content/early/ |
| | FATYYCQQLNSYPPYTFGQGTKLEIK | | | | | | | | | 2020/05/12/science.abc |
| | | | | | | | | | | 2241) |
| BD-236 | ND | IGHV3-53 | IGHJ6 | ND | ND | 2204 | ARDLGEAGG | | ND | Shuo Du et al., 2020 |
| | | (Human) | (Human) | | | | MDV | | | (https://www.biorxiv.or |
| | | | | | | | | | | g/content/10.1101/202 |
| | | | | | | | | | | 0.07.09.195263v1) |
| BD-368-2 | ND | ND | ND | ND | ND | | ND | | ND | Shuo Du et al., 2020 |
| | | | | | | | | | | (https://www.biorxiv.or |
| | | | | | | | | | | g/content/10.1101/202 |
| | | | | | | | | | | 0.07.09.195263v1) |
| BD-494 | ND | IGHV3-53 | IGHJ6 | IGKV1-9 | IGKJ3 | 2205 | ARDLVVYGM | 3409 | QQLNSYPF | Yunlong Cao et al., 2020 |
| | | (Human) | (Human) | (Human) | (Human) | | DV | | T | (https://www.sciencedi |
| | | | | | | | | | | rect.com/science/articl |
| | | | | | | | | | | e/X/S00928674203062 |
| | | | | | | | | | | 06) |
| BD-498 | ND | IGHV3-66 | IGHJ6 | IGKV1-9 | IGKJ5 | 2206 | ARDLVVYGM | 3410 | QQLNSYPL | Yunlong Cao et al., 2020 |
| | | (Human) | (Human) | (Human) | (Human) | | DV | | T | (https://www.sciencedi |
| | | | | | | | | | | rect.com/science/articl |
| | | | | | | | | | | e/pii/S00928674203062 |
| | | | | | | | | | | 06) |
| BD-500 | ND | IGHV3-53 | IGHJ6 | IGKV1-39 | IGKJ5 | 2207 | ARDAMSYG | 3411 | QQSYSTPP | Yunlong Cao et al., 2020 |
| | | (Human) | (Human) | (Human) | (Human) | | MDV | | DT | (https://www.sciencedi |
| | | | | | | | | | | rect.com/science/articl |
| | | | | | | | | | | e/pii/S00928674203062 |
| | | | | | | | | | | 06) |
| BD-503 | ND | IGHV3-53 | IGHJ6 | IGKV1-39 | IGKJ3 | 2208 | ARDAAVYGID | 3412 | QQSYTTPL | Yunlong Cao et al., 2020 |
| | | (Human) | (Human) | (Human) | (Human) | | V | | FT | (https://www.sciencedi |
| | | | | | | | | | | rect.com/science/articl |
| | | | | | | | | | | e/pii/S00928674203062 |
| | | | | | | | | | | 06) |
| BD-504 | ND | IGHV3-66 | IGHJ6 | IGKV1-9 | IGKJ3 | 2209 | ARDLISRGMD | 3413 | QQSYTTPL | Yunlong Cao et al., 2020 |
| | | (Human) | (Human) | (Human) | (Human) | | V | | FT | (https://www.sciencedi |
| | | | | | | | | | | rect.com/science/articl |
| | | | | | | | | | | e/pii/S00928674203062 |
| | | | | | | | | | | 06) |
| BD-505 | ND | IGHV3-53 | IGHJ6 | IGKV1-33 | IGKJ5 | 2210 | ARDRVVYGM | 3414 | HQYDNLPP | Yunlong Cao et al., 2020 |
| | | (Human) | (Human) | (Human) | (Human) | | DV | | T | (https://www.sciencedi |
| | | | | | | | | | | rect.com/science/articl |
| | | | | | | | | | | e/pii/S00928674203062 |
| | | | | | | | | | | 06) |
| BD-506 | ND | IGHV3-53 | IGHJ6 | IGKV1-9 | IGKJ4 | 2211 | ARDLVSYGM | 3415 | QQLNSYPL | Yunlong Cao et al., 2020 |
| | | (Human) | (Human) | (Human) | (Human) | | DV | | T | (https://www.sciencedi |
| | | | | | | | | | | rect.com/science/articl |
| | | | | | | | | | | e/pii/S00928674203062 |
| | | | | | | | | | | 06) |
| BD-507 | ND | IGHV3-53 | IGHJ6 | IGKV1-9 | IGKJ3 | 2212 | ARDLVVYGM | 3416 | QQLNSNP | Yunlong Cao et al., 2020 |
| | | (Human) | (Human) | (Human) | (Human) | | DV | | PIT | (https://www.sciencedi |
| | | | | | | | | | | rect.com/science/articl |
| | | | | | | | | | | e/pii/S00928674203062 |
| | | | | | | | | | | 06) |
| BD-508 | ND | IGHV3-53 | IGHJ6 | IGKV1-39 | IGKJ2 | 2213 | ARDAQNYG | 3417 | QQSYSTPP | Yunlong Cao et al., 2020 |
| | | (Human) | (Human) | (Human) | (Human) | | MDV | | YT | (https://www.sciencedi |
| | | | | | | | | | | rect.com/science/articl |
| | | | | | | | | | | e/pii/S00928674203062 |
| | | | | | | | | | | 06) |
| BD-515 | ND | IGHV3-66 | IGHJ4 | IGKV1-39 | IGKJ5 | | ND | | ND | Yunlong Cao et al., 2020 |
| | | (Human) | (Human) | (Human) | (Human) | | | | | (https://www.sciencedi |
| | | | | | | | | | | rect.com/science/articl |
| | | | | | | | | | | e/pii/S00928674203062 |
| | | | | | | | | | | 06) |

| | | | | | Not | | | | | |
|---|---|---|---|---|---|---|---|---|---|---|
| | Ab | | | Neutral- | Neutral- | | | SEQ | | SEQ |
| | or | | Doesn't | ising | ising | Protein + | | ID | | ID |
| Name | Nb | Binds to | Bind to | Vs | Vs | Epitope | Origin | NO.: | VH or VHH | NO.: |
| BD-604 | Ab | SARS-CoV2 | | SARS-CoV2 | | S; RBD | B-cells; SARS-CoV2 | 126 | EVQLVESGGGLIQPGGSLRLSCAASGIIV | |
| | | | | | | | Human Patient | | SSNYMTWVRQAPGKGLEWVSVIYSGG | |
| | | | | | | | | | STFYADSVKGRFTISRDNSKNTLYLQMSS | |
| | | | | | | | | | LRAEDTAVYYCARDLGPYGMDVWGQG | |
| | | | | | | | | | TTVTVSS | |
| BD-629 | Ab | SARS-CoV2 | | SARS-CoV2 | | S; RBD | B-cells; SARS-CoV2 | 127 | EVQLVESGGGLIQPGGSLRLSCAASEFIV | |
| | | | | | | | Human Patient | | SRNYMSWVRQAPGKGLEWVSVIYSGG | |
| | | | | | | | | | STYYADSVKGRFTISRDNSKNTLNLQMN | |
| | | | | | | | | | SLRAEDTAVYYCARDYGDYYFDYWGQG | |
| | | | | | | | | | TLVTVSS | |
| BD23 | Ab | SARS-CoV2 | | SARS-CoV2 | | S; RBD | B-cells; SARS-CoV2 | 128 | QVQLVQSGSELKKPGASVKVSCKASGYT | 1207 |
| | | | | | | | Human Patient | | FTSYAMNWVRQAPGQGLEWMGWINT | |
| | | | | | | | | | NTGNPTYAQGFTGRFVFSLDTSVSTAYL | |
| | | | | | | | | | QISSLKAEDTAVYYCARPQGGSSWYRDY | |
| | | | | | | | | | YYGMDVWGQGTTVTVSS | |
| Bertoglio | Ab | SARS-CoV2 | | SARS-CoV2 | | S; RBD | Phage Display | | 17 | |
| et al., | | | | | | | Library (Antibody, | | | |
| 2020 | | | | | | | human, non- | | | |
| | | | | | | | immune) | | | |
| C002 | Ab | SARS-CoV2 | SARS- | SARS-CoV2 | SARS-CoV1 | S; RBD | B-cells; SARS-CoV2 | 129 | EVQLVESGGGVVQPGRSLRLSCAASGFT | 1208 |
| | | | CoV1 | | | | Human Patient | | FSIYGMHWVRQAPGKGLEWVAVISYD | |
| | | | | | | | | | GSNKYYADSVKGRFTISRDNSKNTLYLQ | |
| | | | | | | | | | MNSLRAEDTAVYYCAKEGRPSDIVVVVA | |
| | | | | | | | | | FDYWGQGTLVTVSS | |
| C003 | Ab | SARS-CoV2 | SARS- | SARS-CoV2 | SARS-CoV1 | S; RBD | B-cells; SARS-CoV2 | 130 | EVQLVESGGGLIQPGGSLRLSCAASGFT | 1209 |
| | | | CoV1 | (weak) | | | Human Patient | | VSSNYMSWVRQAPGKGLEWVSVIYSG | |
| | | | | | | | | | GSTYYADSVKGRFTISRDNSKNTLYLQM | |
| | | | | | | | | | NSLRAGDTAVYYCARDYGDFYFDYWGQ | |
| | | | | | | | | | GTLVTVSS | |
| C004 | Ab | SARS-CoV2 | SARS- | SARS-CoV2 | SARS-CoV1 | S; RBD | B-cells; SARS-CoV2 | 131 | QVQLVQSGAEVKKPGASVKVSCKASGY | 1210 |
| | | | CoV1 | | | | Human Patient | | TFTGYYMHWVRQAPGQGLEWMGWI | |
| | | | | | | | | | NPISGGTNYAQKFQGRVTMTRDTSISTA | |
| | | | | | | | | | YMELSRLRSDDTAVYYCASPASRGYSGY | |
| | | | | | | | | | DHGYYYYMDVWGKGTTVTVSS | |
| C005 | Ab | SARS-CoV2 | SARS- | SARS-CoV2 | SARS-CoV1 | S; RBD | B-cells; SARS-CoV2 | 132 | QVQLVQSGPEVKKPGTSVKVSCKASGFT | 1211 |
| | | | CoV1 | | | | Human Patient | | FTSSAVQWVRQARGQRLEWIGWIVVG | |
| | | | | | | | | | SGNTNYAQKFQERVTITRDMSTSTAYM | |
| | | | | | | | | | ELSSLRSEDTAVYYCAAPHCSGGSCLDAF | |
| | | | | | | | | | DIWGQGTMVTVSS | |
| C006 | Ab | SARS-CoV2 | SARS- | SARS-CoV2 | SARS-CoV1 | S; RBD | B-cells; SARS-CoV2 | 133 | QVQLVESGGGLVKPGGSLRLSCAASGFI | 1212 |
| | | | CoV1 | (weak) | | | Human Patient | | FSDYCMSWIRRAPGKGLEWLSYISNSGT | |
| | | | | | | | | | TRYYADSVKGRFTISRDNGRNSLYLQMD | |
| | | | | | | | | | SLSAEDTAVYYCARRGDGSSSIYYYNYM | |
| | | | | | | | | | DVWGKGTTVTVSS | |
| C008 | Ab | SARS-CoV2 | SARS- | SARS-CoV2 | SARS-CoV1 | S; RBD | B-cells; SARS-CoV2 | 134 | EVQLVESGGGVVQPGRSLRLSCAASGFT | 1213 |
| | | | CoV1 | (weak) | | | Human Patient | | FSSYGMHWVRQAPGKGLEWVTVISYD | |
| | | | | | | | | | GRNKYYADSVKGRFTISRDNSKNTLYLQ | |
| | | | | | | | | | MNSLRAEDTAVYYCAREFGDPEWYFDY | |
| | | | | | | | | | WGQGTLVTVSS | |
| C009 | Ab | SARS-CoV2 | SARS- | SARS-CoV2 | SARS-CoV1 | S; RBD | B-cells; SARS-CoV2 | 135 | QVQLVQSGAEVKKPGASVKVSCMASGY | 1214 |
| | | | CoV1 | | | | Human Patient | | TFTGYYMHWVRQAPGQGLEWMGWI | |
| | | | | | | | | | NPNSGGTNYAQKFQGRVTMTRDTSIST | |
| | | | | | | | | | AYMELSRLRSDDTAVYYCARDSPFSALG | |
| | | | | | | | | | ASNDYWGQGTLVTVSS | |
| C010 | Ab | SARS-CoV2 | SARS- | | SARS-CoV1, | S; RBD | B-cells; SARS-CoV2 | 136 | EVQLVESGGGVVQPGRSLRLSCAASGFT | 1215 |
| | | | CoV1 | | SARS-CoV2 | | Human Patient | | FSSYAMHWVRQAPAKGLEWVAVILYD | |
| | | | | | | | | | GSGKYYADSVKGRFTISRDNSKNTLYLQ | |
| | | | | | | | | | MNSLRAEDTAVYYCARDGIVDTALVTW | |
| | | | | | | | | | FDYWGQGTLVTVSS | |
| C013 | Ab | SARS-CoV2 | SARS- | SARS-CoV2 | SARS-CoV1 | S; RBD | B-cells; SARS-CoV2 | 137 | QVQLVQSGAEVKKPGSSVKVSCKASGG | 1216 |
| | | | CoV1 | (weak) | | | Human Patient | | TFSSYAISWVRQAPGQGLEWMGGIIPIF | |
| | | | | | | | | | GTANYAQKFQGRVTITADESTSTAYMEL | |
| | | | | | | | | | SSLRSEDTAVYYCARGNRLLYCSSTSCYL | |
| | | | | | | | | | DAVRQGYYYYYYMDVWGKGTTVTVSS | |
| C016 | Ab | SARS-CoV2 | SARS- | | SARS-CoV1, | S; RBD | B-cells; SARS-CoV2 | 138 | EVQLVESGGGVVQPGRSLRLSCAASGFT | 1217 |
| | | | CoV1 | | SARS-CoV2 | | Human Patient | | FSRYGMHWVRQAPGKGLEWVAVISYD | |
| | | | | | | | | | GSNKYYADSVKGRFTISRDNSKNTLYLQ | |
| | | | | | | | | | MNSLRAEDTAVYYCAKVTAPYCSGGSCY | |
| | | | | | | | | | GGNFDYWGQGTLVTVSS | |

| | | | | | | SEQ | | SEQ | | |
|---|---|---|---|---|---|---|---|---|---|---|
| | | Heavy V | Heavy J | Light V | Light J | ID | | ID | | |
| Name | VL | Gene | Gene | Gene | Gene | NO.: | CDRH3 | NO.: | CDRL3 | Sources |
| BD-604 | ND | IGHV3-53 | IGHJ6 | IGKV1-9 | IGKJ2 | 2214 | ARDLGPYGM | | ND | Shuo Du et al., 2020 |
| | | (Human) | (Human) | (Human) | (Human) | | DV | | | (https://www.biorxiv.or |
| | | | | | | | | | | g/content/10.1101/202 |
| | | | | | | | | | | 0.07.09.195263v1) |
| BD-629 | ND | IGHV3-53 | IGHJ4 | IGKV3-20 | IGKJ1 | 2215 | ARDYGDYYFD | | ND | Shuo Du et al., 2020 |
| | | (Human) | (Human) | (Human) | (Human) | | Y | | | (https://www.biorxiv.or |
| | | | | | | | | | | g/content/10.1101/202 |
| | | | | | | | | | | 0.07.09.195263v1) |
| BD23 | DIQMTQSPSTLSASVGDRVTITCRASQ | IGHV7-4- | IGHJ6 | IGKV1-5 | IGKJ2 | 2216 | ARPQGGSSW | 3418 | QQYNSYPY | Yunlong Cao et al., 2020 |
| | SISSWLAWYQQKPGKAPKLLIYKASSL | 1 | (Human) | (Human) | (Human) | | YRDYYYGMD | | T | (https://www.sciencedi |
| | ESGVPSRFSGSGSGTEFTLTISSLQPDD | (Human) | | | | | V | | | rect.com/science/articl |
| | FATYYCQQYNSYPYTFGQGTKLEIK | | | | | | | | | e/pii/S00928674203062 |
| | | | | | | | | | | 06) |
| Bertoglio | 17 | Various | Various | Various | Various | | Various | | Various | Federico Bertoglio et |
| et al., | | | | | | | | | | al., 2020 |
| 2020 | | | | | | | | | | (https://www.biorxiv.or |
| | | | | | | | | | | g/content/10.1101/202 |
| | | | | | | | | | | 0.06.05.135921v1) |
| C002 | DIQLTQSPSSLSASVGDRVTITCRASQS | IGHV3-30 | IGHJ4 | IGKV1-39 | IGKJ1 | 2217 | AKEGRPSDIV | 3419 | QQSYSTPR | Davide Robbiani et al., |
| | ISSYLNWYQQKPGKAPKLLIYAASSLQS | (Human) | (Human) | (Human) | (Human) | | VVVAFDY | | T | 2020 |
| | GVPSRFSGSGSGTDFTLTISSLQPEDFA | | | | | | | | | (https://www.nature.co |
| | TYYCQQSYSTPRTFGQGTKVEIK | | | | | | | | | m/articles/s41586-020- |
| | | | | | | | | | | 2456-9) |
| C003 | EIVLTQSPGTLSLSPGERATLSCRASQS | IGHV3-53 | IGHJ4 | IGKV3-20 | IGKJ2 | 2218 | ARDYGDFYFD | 3420 | QQYGSSPR | Davide Robbiani et al., |
| | VSSTYLAWYQQKPGQAPRLLIYGASSR | (Human) | (Human) | (Human) | (Human) | | Y | | T | 2020 |
| | ATGIPDRFSGSGSGTDFTLTISRLEPED | | | | | | | | | (https://www.nature.co |
| | FAVYYCQQYGSSPRTFGQGTKLEIK | | | | | | | | | m/articles/s41586-020- |
| | | | | | | | | | | 2456-9) |
| C004 | AIRMITQSPSSLSASVGDRVTITCQASQ | IGHV1-2 | IGHJ6 | IGKV1-33 | IGKJ5 | 2219 | ASPASRGYSG | 3421 | QQYDNLPI | Davide Robbiani et al. |
| | DISNYLNWYQQKPGKAPKLLIYDASNL | (Human) | (Human) | (Human) | (Human) | | YDHGYYYYM | | T | 2020 |
| | ETGVPSRFSGSGSGTDFTFTISSLQPED | | | | | | DV | | | (https://www.nature.co |
| | IATYYCQQYDNLPITFGQGTRLEIK | | | | | | | | | m/articles/s41586-020- |
| | | | | | | | | | | 2456-9) |
| C005 | EIVLTQSPGTLSLSPGERATLSCRASQS | IGHV1-58 | IGHJ3 | IGKV3-20 | IGKJ1 | 2220 | AAPHCSGGSC | 3422 | QQYGSSP | Davide Robbiani et al., |
| | VRSSYLAWYQQKPGQAPRLLIYGASSR | (Human) | (Human) | (Human) | (Human) | | LDAFDI | | WT | 2020 |
| | ATGIPDRFSGSGSGTDFTLTISRLEPED | | | | | | | | | (https://www.nature.co |
| | FAVYYCQQYGSSPWTFGQGTKVEIK | | | | | | | | | m/articles/s41586-020- |
| | | | | | | | | | | 2456-9) |
| C006 | QSVLTQPPSASGTPGQRVTVSCSGSSS | IGHV3-11 | IGHJ6 | IGLV1-44 | IGLJ3 | 2221 | ARRGDGSSSI | 3423 | AAWDDSL | Davide Robbiani et al., |
| | NIGSNTVNWYQQLPGTAPKLLIYSNN | (Human) | (Human) | (Human) | (Human) | | YYYNYMDV | | NGPV | 2020 |
| | QRPSGVPDRFSGSKSGTSASLAISGLQ | | | | | | | | | (https://www.nature.co |
| | SEDEADYFCAAWDDSLNGPVFGGGT | | | | | | | | | m/articles/s41586-020- |
| | KLTVL | | | | | | | | | 2456-9) |
| C008 | DIQMTQSPSTLSASVGDRVTITCRANQ | IGHV3-30 | IGHJ4 | IGKV1-5 | IGKJ1 | 2222 | AREFGDPEW | 3424 | QQYNSYW | Davide Robbiani et al., |
| | SISSWLAWYQQKPGKAPKLLIYKASSL | (Human) | (Human) | (Human) | (Human) | | YFDY | | T | 2020 |
| | ESGVPSRFSGSGSGTEFTLTISSLQPDD | | | | | | | | | (https://www.nature.co |
| | FATYYCQQYNSYWTFGQGTKVEIK | | | | | | | | | m/articles/s41586-020- |
| | | | | | | | | | | 2456-9) |
| C009 | QSALTQPPSASGSPGQSVTISCTGTSS | IGHV1-2 | IGHJ4 | IGLV2-8 | IGLJ3 | 2223 | ARDSPFSALG | 3425 | SSDAGSNN | Davide Robbiani et al., |
| | DVGGYNYVSWYQQHPGKAPKLMIYE | (Human) | (Human) | (Human) | (Human) | | ASNDY | | VV | 2020 |
| | VSKRPSGVPDRFSGSKSGNTASLTVSG | | | | | | | | | (https://www.nature.co |
| | LQAEDEAEYYCSSDAGSNNVVFGGGT | | | | | | | | | m/articles/s41586-020- |
| | KLTVL | | | | | | | | | 2456-9) |
| C010 | DIQLTQSPSSLSASVGDRVTITCRASQS | IGHV3-30 | IGHJ4 | IGKV1-39 | IGKJ1 | 2224 | ARDGIVDTAL | 3426 | QQSYSTPP | Davide Robbiani et al., |
| | ISTYLNWYQQKPGKAPKLLIYAASSLQS | (Human) | (Human) | (Human) | (Human) | | VTWFDY | | WT | 2020 |
| | GVPSRFSGSGSGTDFTLTISSLQPEDFA | | | | | | | | | (https://www.nature.co |
| | TYYCQQSYSTPPWTFGQGTKVEIK | | | | | | | | | m/articles/s41586-020- |
| | | | | | | | | | | 2456-9) |
| C013 | EIVLTQSPATLSLSPGERATLSCRASQS | IGHV1-69 | IGHJ6 | IGKV3-11 | IGKJ4 | 2225 | ARGNRLLYCS | 3427 | QQRSNWP | Davide Robbiani et al., |
| | VSSYLAWYQQKPGQAPRLLIYDASNR | (Human) | (Human) | (Human) | (Human) | | STSCYLDAVR | | LT | 2020 |
| | ATGIPARFSGSGSGTDFTLTISSLEPEDF | | | | | | QGYYYYYYM | | | (https://www.nature.co |
| | AVYYCQQRSNWPLTFGGGTKVEIK | | | | | | DV | | | m/articles/s41586-020- |
| | | | | | | | | | | 2456-9) |
| C016 | AIRMTQSPSSLSASVGDRVTITCQASQ | IGHV3-30 | IGHJ4 | IGKV1-33 | IGKJ4 | 2226 | AKVTAPYCSG | 3428 | QQYDNLP | Davide Robbiani et al., |
| | DISNYLNWYQQKPGKAPKLLIYDASNL | (Human) | (Human) | (Human) | (Human) | | GSCYGGNFDY | | PT | 2020 |
| | ETGVPSRFSGSGSGTDFTFTINSLQPED | | | | | | | | | (https://www.nature.co |
| | IATYYCQQYDNLPPTFGGGTKVEIK | | | | | | | | | m/articles/s41586-020- |
| | | | | | | | | | | 2456-9) |

| | | | | | Not | | | | | |
|---|---|---|---|---|---|---|---|---|---|---|
| | Ab | | | Neutral- | Neutral- | | | SEQ | | SEQ |
| | or | | Doesn't | ising | ising | Protein + | | ID | | ID |
| Name | Nb | Binds to | Bind to | Vs | Vs | Epitope | Origin | NO.: | VH or VHH | NO.: |
| C017 | Ab | SARS-CoV2 | SARS- | SARS-CoV2 | SARS-CoV1 | S; RBD | B-cells; SARS-CoV2 | 139 | EVQLVESGGGLVQPGRSLRLSCAASGFT | 1218 |
| | | | CoV1 | | | | Human Patient | | FDDYAMHWVRQAPGKGLEWVSGISW | |
| | | | | | | | | | NSGTIGYADSVKGRFTISRDNAKNSLYLQ | |
| | | | | | | | | | MNSLRAEDTAFYYCAKAGVRGIAAAGP | |
| | | | | | | | | | DLNFDHWGQGTLVTVSS | |
| C018 | Ab | SARS-CoV2 | SARS- | | SARS-CoV1, | S; RBD | B-cells; SARS-CoV2 | 140 | EVQLVESGGGVVQPGRSLRLSCAASGFT | 1219 |
| | | | CoV1 | | SARS-CoV2 | | Human Patient | | FSNYAIHWVRQAPGKGLEWVAVISYDG | |
| | | | | | | | | | SNKYYADSVKGRFTISRDNSKNTLYLQM | |
| | | | | | | | | | NSLRAEDTAVYYCARDFDDSSFWAFDY | |
| | | | | | | | | | WGQGTLVTVSS | |
| C019 | Ab | SARS-CoV2 | SARS- | | SARS-CoV1, | S; RBD | B-cells; SARS-CoV2 | 141 | QVQLVQSGAEVKKPGASVKVSCKASGY | 1220 |
| | | | CoV1 | | SARS-CoV2 | | Human Patient | | TFTSYYMHWVRQAPGQGLEWMGIINP | |
| | | | | | | | | | SGGSTSYAQKFQGRVTMTRDTSTSTVY | |
| | | | | | | | | | MELSSLRSEDTAVYYCARVPREGTPGFD | |
| | | | | | | | | | PWGQGTLVTVSS | |
| C021 | Ab | SARS-CoV2 | SARS- | | SARS-CoV1, | S; RBD | B-cells; SARS-CoV2 | 142 | QVQLQESGPGLVKPSQTLSLTCTVSGGSI | 1221 |
| | | | CoV1 | | SARS-CoV2 | | Human Patient | | SSGGYYWSWIRQHPGKGLEWIGYIYYS | |
| | | | | | | | | | GSTYYNPSLKSRVTISVDTSKNQFSLKLSS | |
| | | | | | | | | | VTAADTAVYYCARVWQYYDSSGSFDYW | |
| | | | | | | | | | GQGTLVTVSS | |
| C022 | Ab | SARS-CoV1, | | SARS-CoV2 | | S; RBD | B-cells; SARS-CoV2 | 143 | QVQLQESGPGLVKPSETLSVTCTVSGGSI | 1222 |
| | | SARS-CoV2 | | | | | Human Patient | | SSSRYYWGWIRQPPGKGLEWIGSIYYSG | |
| | | | | | | | | | STYYNPSLKSRVTISVDTSKNQFSLKLSSV | |
| | | | | | | | | | TAADTAVYYCARHAAAYYDRSGYYFIEYF | |
| | | | | | | | | | QHWGQGTLVTVSS | |
| C027 | Ab | SARS-CoV1 | | | SARS-CoV2 | S; RBD | B-cells; SARS-CoV2 | 144 | EVQLVESGGGVVQPGRSLRLSCAASGFT | 1223 |
| | | (weak), | | | | | Human Patient | | FSSYGMHWVRQAPGKGLEWVAVISYD | |
| | | SARS-CoV2 | | | | | | | GSNKYYADSVKGRFTISRDNSKNTLYLQ | |
| | | | | | | | | | MNSLRAEDTAVYYCAKASGIYCSGGDCY | |
| | | | | | | | | | SYYFDYWGQGTLVTVSS | |
| C029 | Ab | SARS-CoV2 | SARS- | | SARS-CoV1, | S; RBD | B-cells; SARS-CoV2 | 145 | QVQLQESGPGLVKPSQTLSLTCTVSGGSI | 1224 |
| | | | CoV1 | | SARS-CoV2 | | Human Patient | | SSGGYYWSWIRQHPGKGLEWIGYIYYS | |
| | | | | | | | | | GSTYYNPSLKSRVTISVDTSKNQFSLKLSS | |
| | | | | | | | | | VTAADTAVYYCARTMYYYDSSGSFDYW | |
| | | | | | | | | | GQGTLVTVSS | |
| C030 | Ab | SARS-CoV2 | SARS- | | SARS-CoV1, | S; RBD | B-cells; SARS-CoV2 | 146 | EVQLVESGGGVVQPGRSLRLSCAASGFT | 1225 |
| | | | CoV1 | | SARS-CoV2 | | Human Patient | | FSSYGMHWVRQAPGKGLEWVAVISYD | |
| | | | | | | | | | GSNKYYADSVKGRFTISRDNSKNTLYLQ | |
| | | | | | | | | | MNSLRAEDTAVYYCAKASGIYCSGGNCY | |
| | | | | | | | | | SYYFDYWGQGTLVTVSS | |
| C031 | Ab | SARS-CoV2 | SARS- | | SARS-CoV1, | S; RBD | B-cells; SARS-CoV2 | 147 | EVQLVESGGGLVQPGGSLRLSCAASGFT | 1226 |
| | | | CoV1 | | SARS-CoV2 | | Human Patient | | FSSYDMHWVRQATGKGLEWVSAIGTA | |
| | | | | | | | | | GDTYYPGSVKGRFTISRENAKNSLYLQM | |
| | | | | | | | | | NSLRAGDTAVYYCARVGYDSSGYSGWY | |
| | | | | | | | | | FDLWGRGTLVTVSS | |
| C101 | Ab | SARS-CoV2 | SARS- | SARS-CoV2 | SARS-CoV1 | S; RBD | B-cells; SARS-CoV2 | 148 | QVQLVESGGGLIQPGGSLRLSCAASGFI | 1227 |
| | | | CoV1 | | | | Human Patient | | VSSNYMSWVRQAPGKGLEWVSVIYSG | |
| | | | | | | | | | GSTFYTDSVKGRFTISRDNSKNTLYLQM | |
| | | | | | | | | | NSLRAEDTAVYYCVRDYGDFYFDYWGQ | |
| | | | | | | | | | GTLVTVSS | |
| C102 | Ab | SARS-CoV2 | SARS- | SARS-CoV2 | SARS-CoV1 | S; RBD | B-cells; SARS-CoV2 | 149 | QVQLVESGGGLIQPGGSLRLSCAASGFI | 1228 |
| | | | CoV1 | | | | Human Patient | | VSSNYMSWVRQAPGKGLEWVSVIYSG | |
| | | | | | | | | | GSTFYADSVKGRFTISRDNSKNTLYLQM | |
| | | | | | | | | | NSLRAEDTAVYYCARDYGDYYFDYWGQ | |
| | | | | | | | | | GTLVTVSS | |
| C103 | Ab | SARS-CoV2 | SARS- | SARS-CoV2 | SARS-CoV1 | S; RBD | B-cells; SARS-CoV2 | 150 | QVQLQQWGAGLLKPSETLSLTCAVSGG | 1229 |
| | | | CoV1 | | | | Human Patient | | SLSGFYWTWIRQPPGKGLEWIGETNHF | |
| | | | | | | | | | GSTGYKPSLKSRVTISVDMSRNQFSLKVT | |
| | | | | | | | | | SVTAADTAVYYCARKPLLYSDFSPGAFDI | |
| | | | | | | | | | WGQGTMVTVSS | |
| C104 | Ab | SARS-CoV2 | SARS- | SARS-CoV2 | SARS-CoV1 | S; RBD | B-cells; SARS-CoV2 | 151 | QVQLQQWGAGLLKPSETLSLSCAVYGG | 1230 |
| | | | CoV1 | | | | Human Patient | | SLSGYYWSWIRQPPGKGLEWIGEINHF | |
| | | | | | | | | | GSTGYNPSLKSRVTISVDTSKSQFSVKLSS | |
| | | | | | | | | | VTAADTAVYYCARKPLLYSNLSPGAFDI | |
| | | | | | | | | | WGQGTMVTVSS | |

| | | | | | | SEQ | | SEQ | | |
|---|---|---|---|---|---|---|---|---|---|---|
| | | Heavy V | Heavy J | Light V | Light J | ID | | ID | | |
| Name | VL | Gene | Gene | Gene | Gene | NO.: | CDRH3 | NO.: | CDRL3 | Sources |
| C017 | EIVLTQSPATLSLSPGERATLSCRASQS | IGHV3-9 | IGHJ4 | IGKV3-11 | IGKJ5 | 2227 | AKAGVRGIAA | 3429 | QQRIT | Davide Robbiani et al., |
| | VSSYLAWYQQKPGQAPRLLIYDASNR | (Human) | (Human) | (Human) | (Human) | | AGPDLNFDH | | | 2020 |
| | ATGIPARFSGSGSGTDFTLTISSLEPEDF | | | | | | | | | (https://www.nature.co |
| | AVYYCQQRITFGQGTRLEIK | | | | | | | | | m/articles/s41586-020- |
| | | | | | | | | | | 2456-9) |
| C018 | DIQLTQSPSSLSASVGDRVTITCRASQS | IGHV3-30 | IGHJ4 | IGKV1-39 | IGKJ2 | 2228 | ARDFDDSSF | 3430 | QQSYSTPP | Davide Robbiani et al., |
| | IRSYLNWYQQKPGKAPKLLIYAASSLQ | (Human) | (Human) | (Human) | (Human) | | WAFDY | | AT | 2020 |
| | SGVPSRFSGSGSGTDFTLTISSLQPDDF | | | | | | | | | (https://www.nature.co |
| | ATYYCQQSYSTPPATFGQGTKLEIK | | | | | | | | | m/articles/s41586-020- |
| | | | | | | | | | | 2456-9) |
| C019 | SYELTQPPSVSVAPGKTARITCGENNI | IGHV1-46 | IGHJ5 | IGLV3-21 | IGLJ3 | 2229 | ARVPREGTPG | 3431 | QVWDSSS | Davide Robbiani et al., |
| | GSKSVHWYQQKPGQAPVLVIYYDSDR | (Human) | (Human) | (Human) | (Human) | | FDP | | DHVV | 2020 |
| | PSGIPERFSGSNSGNTATLTINRVEAG | | | | | | | | | (https://www.nature.co |
| | DEADYYCQVWDSSSDHVVFGGGTKL | | | | | | | | | m/articles/s41586-020- |
| | TVL | | | | | | | | | 2456-9) |
| C021 | DIVMTQSPLSLPVTPGEPASISCRSSQS | IGHV4-31 | IGHJ4 | IGKV2-28 | IGKJ3 | 2230 | ARVWQYYDS | 3432 | MQALQTP | Davide Robbiani et al., |
| | LLHSNGYNYLDWYLQKPGQSPQLLIYL | (Human) | (Human) | (Human) | (Human) | | SGSFDY | | FT | 2020 |
| | GSNRASGVPDRFSGSGSGTDFTLKISR | | | | | | | | | (https://www.nature.co |
| | VEAEDVGVYYCMQALQTPFTFGPGTK | | | | | | | | | m/articles/s41586-020- |
| | VDIK | | | | | | | | | 2456-9) |
| C022 | DIQMTQSPSTLSASVGDSVTITCRASQ | IGHV4-39 | IGHJ1 | IGKV1-5 | IGKJ2 | 2231 | ARHAAAYYDR | 3433 | QQYNNYR | Davide Robbiani et al., |
| | SISSWLAWYQQKPGKAPKLLIYKASSL | (Human) | (Human) | (Human) | (Human) | | SGYYFIEYFQH | | YT | 2020 |
| | ESGVPSRFSGSGSGTEFTLTISSLQPDD | | | | | | | | | (https://www.nature.co |
| | FATYYCQQYNNYRYTFGQGTKLEIK | | | | | | | | | m/articles/s41586-020- |
| | | | | | | | | | | 2456-9) |
| C027 | DIQMTQSPSTLSASVGDRVTITCRASQ | IGHV3-30 | IGHJ4 | IGKV1-5 | IGKJ1 | 2232 | AKASGIYCSG | 3434 | QQYNSYST | Davide Robbiani et al., |
| | SISSWLAWYQQKPGKAPKLLIYKASSL | (Human) | (Human) | (Human) | (Human) | | GDCYSYYFDY | | | 2020 |
| | ESGVPSRFSGSGSGTEFTLTISSLQPDD | | | | | | | | | (https://www.nature.co |
| | FATYYCQQYNSYSTFGQGTKVEIK | | | | | | | | | m/articles/s41586-020- |
| | | | | | | | | | | 2456-9) |
| C029 | DIVMTQSPLSLPVTPGEPASISCRSSQS | IGHV4-31 | IGHJ4 | IGKV2-28 | IGKJ4 | 2233 | ARTMYYYDSS | 3435 | MQALQTP | Davide Robbiani et al., |
| | LLHSNGYNYLDWYLQKPGQSPQLLIYL | (Human) | (Human) | (Human) | (Human) | | GSFDY | | HT | 2020 |
| | GSNRASGVPDRFSGSGSGTDFTLKISR | | | | | | | | | (https://www.nature.co |
| | VEAEDVGVYYCMQALQTPHTFGGGT | | | | | | | | | m/articles/s41586-020- |
| | KVEIK | | | | | | | | | 2456-9) |
| C030 | DIQMTQSPSTLSASVGDRVTITCRASQ | IGHV3-30 | IGHJ4 | IGKV1-5 | IGKJ1 | 2234 | AKASGIYCSG | 3436 | QQYNSYST | Davide Robbiani et al., |
| | SISSWLAWYQQKPGKAPKLLIYKASSL | (Human) | (Human) | (Human) | (Human) | | GNCYSYYFDY | | | 2020 |
| | ESGVPSRFSGSGSGTEFTLTISSLQPDD | | | | | | | | | (https://www.nature.co |
| | FATYYCQQYNSYSTFGQGTKVEIK | | | | | | | | | m/articles/s41586-020- |
| | | | | | | | | | | 2456-9) |
| C031 | DIQMTQSPSSLSASVGDRVTITCRASQ | IGHV3-13 | IGHJ2 | IGKV1-39 | IGKJ4 | 2235 | ARVGYDSSGY | 3437 | QQSYSTPP | Davide Robbiani et al., |
| | SISSYLNWYQQKPGKAPKVLIYAASSL | (Human) | (Human) | (Human) | (Human) | | SGWYFDL | | LT | 2020 |
| | QSGVPSRFSGSGSGTDFTLTISSLQPED | | | | | | | | | (https://www.nature.co |
| | FATYYCQQSYSTPPLTFGGGTKVEIK | | | | | | | | | m/articles/s41586-020- |
| | | | | | | | | | | 2456-9) |
| C101 | EIVLTQSPGTLSLSPGERATLSCRASQS | IGHV3-53 | IGHJ4 | IGKV3-20 | IGKJ1 | 2236 | VRDYGDFYFD | 3438 | QQYGSSPR | m/articles/s41586-020- |
| | VSSSYLAWYQQKPGQAPRLLIYGASSR | (Human) | (Human) | (Human) | (Human) | | Y | | T | Davide Robbiani et al., |
| | ATGIPDRFSGGGSETDFTLTISRLEPED | | | | | | | | | 2020 |
| | CAVYYCQQYGSSPRTFGQGTKVEIK | | | | | | | | | (https://www.nature.co |
| | | | | | | | | | | 2456-9) |
| C102 | EIVLTQSPGTLSLSPGERATLSCRASQS | IGHV3-53 | IGHJ4 | IGKV3-20 | IGKJ1 | 2237 | ARDYGDYYFD | 3439 | QQYGSSPR | Davide Robbiani et al., |
| | VSSSYLAWYQQKPGQAPRLLIYGASSR | (Human) | (Human) | (Human) | (Human) | | Y | | T | 2020 |
| | ATGIPDRFSGSGSGTDFTLTISRLEPED | | | | | | | | | (https://www.nature.co |
| | FAVYYCQQYGSSPRTFGQGTKVEIK | | | | | | | | | m/articles/s41586-020- |
| | | | | | | | | | | 2456-9) |
| C103 | EIVLTQSPGTLSLSPGERATLSCRASQT | IGHV4-34 | IGHJ3 | IGKV3-20 | IGKJ4 | 2238 | ARKPLLYSDFS | 3440 | QQYTTTPR | Davide Robbiani et al., |
| | VTANYLAWYQQKPGQAPRLLIYGASK | (Human) | (Human) | (Human) | (Human) | | PGAFDI | | T | 2020 |
| | RATGIPDRFSGSGSGTDFTLSISRLEPE | | | | | | | | | (https://www.nature.co |
| | DFAVYYCQQYTTTPRTFGGGTKVEIK | | | | | | | | | m/articles/s41586-020- |
| | | | | | | | | | | 2456-9) |
| C104 | EIVLTQSPGTVSLSPGERATLSCWASQ | IGHV4-34 | IGHJ3 | IGKV3-20 | IGKJ4 | 2239 | ARKPLLYSNLS | 3441 | QQYGTTPR | Davide Robbiani et al., |
| | SVSASYLAWYQQKPGQAPRLLIYGASS | (Human) | (Human) | (Human) | (Human) | | PGAFDI | | T | 2020 |
| | RATGIPDRFSGSGSGTDFTLTISRLEPE | | | | | | | | | (https://www.nature.co |
| | DFAVYYCQQYGTTPRTFGGGTKVEIK | | | | | | | | | m/articles/s41586-020- |
| | | | | | | | | | | 2456-9) |

| | | | | | Not | | | | | |
|---|---|---|---|---|---|---|---|---|---|---|
| | Ab | | | Neutral- | Neutral- | | | SEQ | | SEQ |
| | or | | Doesn't | ising | ising | Protein + | | ID | | ID |
| Name | Nb | Binds to | Bind to | Vs | Vs | Epitope | Origin | NO.: | VH or VHH | NO.: |
| C105 | Ab | SARS-CoV2 | SARS- | SARS-CoV2 | SARS-CoV1 | S; RBD | B-cells; SARS-CoV2 | 152 | QVQLVESGGGLIQPGGSLRLSCAASGFT | 1231 |
| | | | CoV1 | | | | Human Patient | | VSSNYMSWVRQAPGKGLEWVSVIYSG | |
| | | | | | | | | | GSTYYADSVKGRFTISRDNSKNTLYLQM | |
| | | | | | | | | | NSLRAEDTAVYYCARGEGWELPYDYWG | |
| | | | | | | | | | QGTLVTVSS | |
| C106 | Ab | SARS-CoV1, | | | SARS-CoV2 | S; RBD | B-cells; SARS-CoV2 | 153 | QLQLQESGPGLVKPSETLSLTCTVSGASV | 1232 |
| | | SARS-CoV2 | | | | | Human Patient | | SSGSYYWSWIRQPPGKGLEWIGYIYYSG | |
| | | | | | | | | | STNYNPSLKSRVTISVDTSKNQFSLKLSSV | |
| | | | | | | | | | TAADTAVYYCARERPGGTYSNTWYTPT | |
| | | | | | | | | | DTNWFDTWGQGTLVTVSS | |
| C107 | Ab | SARS-CoV2 | SARS- | | SARS-CoV1, | S; RBD | B-cells; SARS-CoV2 | 154 | QVQLVQSGAEVKKPGASVRVSCKASGY | 1233 |
| | | | CoV1 | | SARS-CoV2 | | Human Patient | | TFTSYGFSWVRQAPGQGLEWMGWISA | |
| | | | | | | | | | YNGNTNFAQKLQGRVTMTTDTSTSTAY | |
| | | | | | | | | | MELRSLRSDDTAVYYCARGEAVAGTTGF | |
| | | | | | | | | | FDYWGQGTLVTVSS | |
| C108 | Ab | SARS-CoV2 | SARS- | SARS-CoV2 | SARS-CoV1 | S; RBD | B-cells; SARS-CoV2 | 155 | QVQLQESGPGLVKPSGTLSLTCAVSGGS | 1234 |
| | | | CoV1 | (weak) | | | Human Patient | | ISSTNWWSWVRQPPGKGLEWIGEIYHT | |
| | | | | | | | | | GSTNYNPSLKSRVTISVDKSKNQFSLKLSS | |
| | | | | | | | | | VTAADTAVYYCVRDGGRPGDAFDIWG | |
| | | | | | | | | | QGTMVTVSS | |
| C109 | Ab | SARS-CoV2 | | | | S; RBD | B-cells; SARS-CoV2 | 156 | EVQLVESGGGLVQPGGSLRLSCAASGFT | 1235 |
| | | | | | | | Human Patient | | FSSYWMSWVRQAPGKGLEWVANIKQ | |
| | | | | | | | | | DGSEKYYVDSVKGRFTISGDNAKNSLYL | |
| | | | | | | | | | HMNSLRAEDTAVYYCAIQLWLRGGYDY | |
| | | | | | | | | | WGQGTLVTVSS | |
| C110 | Ab | SARS-CoV2 | SARS- | SARS-CoV2 | SARS-CoV1 | S; RBD | B-cells; SARS-CoV2 | 157 | QVQLQQSGAEVKKPGESLKISCKGSGYS | 1236 |
| | | | CoV1 | | | | Human Patient | | FTSYWIGWVRQMPGKGLEWMGIIYPG | |
| | | | | | | | | | DSDTRYSPSFQGQVTISADKSISTAYMQ | |
| | | | | | | | | | WSSLKASDTAMYYCARSFRDDPRIAVA | |
| | | | | | | | | | GPADAFDIWGQGTMVTVSS | |
| C111 | Ab | SARS-CoV2 | | | | S; RBD | B-cells; SARS-CoV2 | 158 | QLQLQESGPGLVKPSETLSLTCTVSGGSI | 1237 |
| | | | | | | | Human Patient | | SSYYWSWIRQPPGKGLEWIGYIYYSGST | |
| | | | | | | | | | NYNPSLKSRVTISVDTSKNQFSLKLSSVTA | |
| | | | | | | | | | ADTAVYYCARVEDWGYCSSTNCYSGAF | |
| | | | | | | | | | DIWGQGTMVTVSS | |
| C112 | Ab | SARS-CoV2 | SARS- | SARS-CoV2 | SARS-CoV1 | S; RBD | B-cells; SARS-CoV2 | 159 | QVQLVESGGGVVQPGRSLRLSCAASGF | 1238 |
| | | | CoV1 | (weak) | | | Human Patient | | TFSSHAMHWVRQAPGKGLEWVAVISY | |
| | | | | | | | | | DGSNKYYADSVKGRFTISRDNSKNTLYL | |
| | | | | | | | | | QMNSLRAEDTAVYYCAREDYYDSSGSF | |
| | | | | | | | | | DYWGQGTLVTVSS | |
| C113 | Ab | SARS-CoV2 | SARS- | | SARS-CoV1, | S; RBD | B-cells; SARS-CoV2 | 160 | QVQLVESGGGVVQPGRSLRLSCAASGF | 1239 |
| | | | CoV1 | | SARS-CoV2 | | Human Patient | | TFSNFGMHWVRQAPGKGLEWVAVIW | |
| | | | | | | | | | YDGSNKYYADSVKGRFTISRDNSKNTLYL | |
| | | | | | | | | | QMNSLRAEDTAVYYCARGVNPDDILTG | |
| | | | | | | | | | VDAFDIWGQGTMVTVSS | |
| C114 | Ab | SARS-CoV2 | SARS- | | SARS-CoV1, | S; RBD | B-cells; SARS-CoV2 | 161 | QVQLVESGGGLIQPGGSLKLSCVVSGFT | 1240 |
| | | | CoV1 | | SARS-CoV2 | | Human Patient | | VSKNYISWVRQAPGKGLEWVSVIFAGG | |
| | | | | | | | | | STFYADSVKGRFAISRDNSNNTLFLQMN | |
| | | | | | | | | | SLRVEDTAIYYCARGDGELFFDQWGQG | |
| | | | | | | | | | TLVTVSS | |
| C115 | Ab | SARS-CoV2 | SARS- | SARS-CoV2 | SARS-CoV1 | S; RBD | B-cells; SARS-CoV2 | 162 | QVQLVESGGGLIKPGRSLRLSCTASGFTF | 1241 |
| | | | CoV1 | (weak) | | | Human Patient | | GDYAMTWFRQAPGKGLEWVGFIRSKA | |
| | | | | | | | | | YGGTTGYAASVKYRFTISRDDSKSIAYLQ | |
| | | | | | | | | | MDSLKTEDTAVYYCTRWDGWSQHDY | |
| | | | | | | | | | WGQGTLVTVSS | |
| C116 | Ab | SARS-CoV2 | SARS- | | SARS-CoV1, | S; RBD | B-cells; SARS-CoV2 | 163 | QVQLVESGGGVVQPGRSLRLSCAASGF | 1242 |
| | | | CoV1 | | SARS-CoV2 | | Human Patient | | TYSTYAMHWVRQAPGKGLEWVAFISYD | |
| | | | | | | | | | GSNKYYADSVKGRFTISRDNSKNTLYLQ | |
| | | | | | | | | | MNSLRAEDTAVYYCARDFYHNWFDPW | |
| | | | | | | | | | GQGTLVTVSS | |
| C117 | Ab | SARS-CoV2 | SARS- | SARS-CoV2 | SARS-CoV1 | S; RBD | B-cells; SARS-CoV2 | 164 | QVQLVESGGGVVQPGRSLRLSCAASGF | 1243 |
| | | | CoV1 | (weak) | | | Human Patient | | TFSTYAMHWVRQAPGEGLEWVAVISY | |
| | | | | | | | | | DGSNTYYADSVKGRFTISRDNSKNTLYL | |
| | | | | | | | | | QMNSLRAEDTAVYYCARDPIWFGELLSP | |
| | | | | | | | | | PFVHFDYWGQGTLVTVSS | |

| | | | | | | SEQ | | SEQ | | |
|---|---|---|---|---|---|---|---|---|---|---|
| | | Heavy V | Heavy J | Light V | Light J | ID | | ID | | |
| Name | VL | Gene | Gene | Gene | Gene | NO.: | CDRH3 | NO.: | CDRL3 | Sources |
| C105 | QSALTQPPSASGSPGQSVTISCTGTSS | IGHV3-53 | IGHJ4 | IGLV2-8 | IGLJ3 | 2240 | ARGEGWELP | 3442 | SSYEGSNN | Davide Robbiani et al., |
| | DVGGYKYVSWYQQHPGKAPKLMIYE | (Human) | (Human) | (Human) | (Human) | | YDY | | FVV | 2020 |
| | VSKRPSGVPDRFSGSKSGNTASLTVSG | | | | | | | | | (https://www.nature.co |
| | LQAEDEADYYCSSYEGSNNFVVFGGG | | | | | | | | | m/articles/s41586-020- |
| | TKLTVL | | | | | | | | | 2456-9); Christopher |
| | | | | | | | | | | Barnes et al., 2020 |
| | | | | | | | | | | (https://www.sciencedi |
| | | | | | | | | | | rect.com/science/articl |
| | | | | | | | | | | e/pii/S00928674203075 |
| | | | | | | | | | | 71) |
| C106 | SYELTQPPSVSVAPGKTARITCGGNNI | IGHV4-61 | IGHJ4 | IGLV3-21 | IGLJ3 | 2241 | ARERPGGTYS | 3443 | QVWDSSR | Davide Robbiani et al., |
| | GSKSVHWYQQKPGQAPVLVIYFDSDR | (Human) | (Human) | (Human) | (Human) | | NTWYTPTDT | | DHVV | 2020 |
| | PSGIPERFSGSNSGNTATLTISRVEAGD | | | | | | NWFDT | | | (https://www.nature.co |
| | EADYYCQVWDSSRDHVVFGGGTKLT | | | | | | | | | m/articles/s41586-020- |
| | VL | | | | | | | | | 2456-9) |
| C107 | QSVLTQPPSASGTPGQRVTISCSGSSS | IGHV1-18 | IGHJ4 | IGLV1-47 | IGLJ3 | 2242 | ARGEAVAGTT | 3444 | AAWDDSL | Davide Robbiani et al., |
| | NIGSNYVYWYQQLPGTAPKLLIYRNN | (Human) | (Human) | (Human) | (Human) | | GFFDY | | SGFVV | 2020 |
| | QRPSGVPDRFSGSKSGTSASLAISGLRS | | | | | | | | | (https://www.nature.co |
| | EDEADYYCAAWDDSLSGFVVFGGGTK | | | | | | | | | m/articles/s41586-020- |
| | LTVI | | | | | | | | | 2456-9) |
| C108 | QSALTQPASVSGSPGQSITISCTGTSSD | IGHV4-4 | IGHJ3 | IGLV2-14 | IGLJ1 | 2243 | VRDGGRPGD | 3445 | NSYTSSSTR | Davide Robbiani et al., |
| | VGGYNYVSWYQQHPGKAPKLMIYDV | (Human) | (Human) | (Human) | (Human) | | AFDI | | V | 2020 |
| | SNRPSGVSNRFSGSKSGNTASLTISGL | | | | | | | | | (https://www.nature.co |
| | QAEDEADYYCNSYTSSSTRVFGTGTKV | | | | | | | | | m/articles/s41586-020- |
| | TVL | | | | | | | | | 2456-9) |
| C109 | QSALTQPPSASGSPGQSVTISCTGTSS | IGHV3-7 | IGHJ4 | IGLV2-8 | IGLJ3 | 2244 | AIQLWLRGGY | 3446 | SSYAGSNN | Davide Robbiani et al., |
| | DVGGYNYVSWYQQHPGKAPKLMIYE | (Human) | (Human) | (Human) | (Human) | | DY | | YVV | 2020 |
| | VTKRPSGVPDRFSGSKSGNTASLTVSG | | | | | | | | | (https://www.nature.co |
| | LQAEDEADYYCSSYAGSNNYVVFGGG | | | | | | | | | m/articles/s41586-020- |
| | TKLTVL | | | | | | | | | 2456-9) |
| C110 | DIQMTQSPSTLSASVGDRVTITCRASQ | IGHV5-51 | IGHJ3 | IGKV1-5 | IGKJ2 | 2245 | ARSFRDDPRI | 3447 | QQYNSYPY | Davide Robbiani et al., |
| | SISYWLAWYQQKPGKAPKLLIYQASSL | (Human) | (Human) | (Human) | (Human) | | AVAGPADAF | | T | 2020 |
| | ESGVPSRFSGSESGTEFTLTISSLQPDD | | | | | | DI | | | (https://www.nature.co |
| | FATYYCQQYNSYPYTFGQGTKLEIK | | | | | | | | | m/articles/s41586-020- |
| | | | | | | | | | | 2456-9) |
| C111 | QSVLTQPPSVSEAPRQRVTISCSGSSS | IGHV4-59 | IGHJ3 | IGLV1-36 | IGLJ3 | 2246 | ARVEDWGYC | 3448 | AAWDDSL | Davide Robbiani et al., |
| | NIGNNAVNWYQQVPGKAPKLLIYYDD | (Human) | (Human) | (Human) | (Human) | | SSTNCYSGAF | | NGAWV | 2020 |
| | LLPSGVSDRFSGSKSGTSASLAISGLQS | | | | | | DI | | | (https://www.nature.co |
| | EDEADYYCAAWDDSLNGAWVFGGG | | | | | | | | | m/articles/s41586-020- |
| | TKLTVL | | | | | | | | | 2456-9) |
| C112 | QSALTQPASVSGSPGQSITISCTGTSSD | IGHV3-30 | IGHJ4 | IGLV2-14 | IGLJ3 | 2247 | AREDYYDSSG | 3449 | SSYTSSST | Davide Robbiani et al., |
| | VGGYNYVSWYQQHPGKAPKLMIYDV | (Human) | (Human) | (Human) | (Human) | | SFDY | | WV | 2020 |
| | SNRPSGVSNRFSGSKSGNTASLTISGL | | | | | | | | | (https://www.nature.co |
| | QAEDEADYYCSSYTSSSTWVFGGGTKL | | | | | | | | | m/articles/s41586-020- |
| | TVL | | | | | | | | | 2456-9) |
| C113 | DIQMTQSPSTLSASVGDRVTITCRASQ | IGHV3-33 | IGHJ3 | IGKV1-5 | IGKJ4 | 2248 | ARGVNPDDIL | 3450 | QQHNSSPL | Davide Robbiani et al., |
| | SMSSWLAWYQQKPGNAPKLLIYKASS | (Human) | (Human) | (Human) | (Human) | | TGVDAFDI | | T | 2020 |
| | LESGVPSRFSGSGSGTEFTLTISSLQPD | | | | | | | | | (https://www.nature.co |
| | DFATYYCQQHNSSPLTFGGGTKVEIK | | | | | | | | | m/articles/s41586-020- |
| | | | | | | | | | | 2456-9) |
| C114 | QSVLTQPPSVSGAPGQRVTISCTGTSS | IGHV3-53 | IGHJ4 | IGLV1-40 | IGLJ3 | 2249 | ARGDGELFFD | 3451 | QSYDSSLY | Davide Robbiani et al., |
| | NIGAGYDVHWYQQLPGRAPKVLISGN | (Human) | (Human) | (Human) | (Human) | | Q | | AV | 2020 |
| | NIRPSEVPDRFSGSRSGTSASLAITSLQ | | | | | | | | | (https://www.nature.co |
| | PEDEAQYYCQSYDSSLYAVFGGGTKLT | | | | | | | | | m/articles/s41586-020- |
| | VL | | | | | | | | | 2456-9) |
| C115 | DIVMTQSPLSLSVTPGEPASISCRSSQS | IGHV3-49 | IGHJ4 | IGKV2-28 | IGKJ2 | 2250 | TRWDGWSQ | 3452 | MQVLQIPY | Davide Robbiani et al., |
| | LLHSNGNNYFDWYLQKPGQSPQLLIY | (Human) | (Human) | (Human) | (Human) | | HDY | | T | 2020 |
| | LGSNRASGVPDRFSGSGSGTDFTLKIS | | | | | | | | | (https://www.nature.co |
| | RVEAEDVGVYYCMQVLQIPYTFGQGT | | | | | | | | | m/articles/s41586-020- |
| | KLEIK | | | | | | | | | 2456-9) |
| C116 | NFMLTQPHSVSESPGKTVTISCTGSSG | IGHV3-30 | IGHJ5 | IGLV6-57 | IGLJ3 | 2251 | ARDFYHNWF | 3453 | QSYDSGN | Davide Robbiani et al., |
| | SIASNYVQWYQQRPGSAPTTVIYEDN | (Human) | (Human) | (Human) | (Human) | | DP | | HWVV | 2020 |
| | QRPSGVPDRFSGSIDRSSNSASLTISGL | | | | | | | | | (https://www.nature.co |
| | KTEDEADYYCQSYDSGNHWVVFGGG | | | | | | | | | m/articles/s41586-020- |
| | TRLTVL | | | | | | | | | 2456-9) |
| C117 | QSVLTQPPSVSAAPGQKVTISCSGSSS | IGHV3-30 | IGHJ4 | IGLV1-51 | IGLJ1 | 2252 | ARDPIWFGEL | 3454 | GAWDSSLS | Davide Robbiani et al., |
| | NIGNNLVSWYQQLPGTAPKLLIYENN | (Human) | (Human) | (Human) | (Human) | | LSPPFVHFDY | | AGGVYV | 2020 |
| | KRPSGIPDRFSGSKSGTSATLGITGLQT | | | | | | | | | (https://www.nature.co |
| | GDEADYYCGAWDSSLSAGGVYVFGT | | | | | | | | | m/articles/s41586-020- |
| | GTKVTVL | | | | | | | | | 2456-9) |

| | | | | | Not | | | | | |
|---|---|---|---|---|---|---|---|---|---|---|
| | Ab | | | Neutral- | Neutral- | | | SEQ | | SEQ |
| | or | | Doesn't | ising | ising | Protein + | | ID | | ID |
| Name | Nb | Binds to | Bind to | Vs | Vs | Epitope | Origin | NO.: | VH or VHH | NO.: |
| C118 | Ab | SARS-CoV1, | | SARS-CoV2 | | S; RBD | B-cells; SARS-CoV2 | 165 | QVQLVESGGGVVQPGRSLRLSCAASGF | 1244 |
| | | SARS-CoV2 | | (weak) | | | Human Patient | | TFSNYAMHWVRQAPGKGLEWVAVISY | |
| | | | | | | | | | DGSNKYYADSVKGRFTISRDNSKNTLYL | |
| | | | | | | | | | QMNSLRAEDTAIYYCASGYTGYDYFVRG | |
| | | | | | | | | | DYYGLDVWGQGTTVTVSS | |
| C119 | Ab | SARS-CoV2 | SARS- | SARS-CoV2 | SARS-CoV1 | S; RBD | B-cells; SARS-CoV2 | 166 | QVQLVQSGAEVKKPGASVKVSCKASGY | 1245 |
| | | | CoV1 | | | | Human Patient | | TFTSYYMHWVRQAPGQGLEWMGIINP | |
| | | | | | | | | | SGGSTSYAQKLQGRVTMTRDTSTSTVY | |
| | | | | | | | | | MELSSLRSEDTAVYYCARANHETTMDTY | |
| | | | | | | | | | YYYYYMDVWGKGTTVTVSS | |
| C120 | Ab | SARS-CoV2 | SARS- | SARS-CoV2 | SARS-CoV1 | S; RBD | B-cells; SARS-CoV2 | 167 | EVQLVESGGGLIQPGGSLRLSCAASGFT | 1246 |
| | | | CoV1 | | | | Human Patient | | VSSNYMTWVRQAPGKGLEWVSLIYPG | |
| | | | | | | | | | GSTYYADSVKGRFTISRDNSKNTLYLQM | |
| | | | | | | | | | NSLRAEDTAVYYCAREGMGMAAAGTW | |
| | | | | | | | | | GQGTLVTVSS | |
| C121 | Ab | SARS-CoV2 | SARS- | SARS-CoV2 | SARS-CoV1 | S; RBD | B-cells; SARS-CoV2 | 168 | QVQLVQSGAEVKKPGASVKVSCKASGY | 1247 |
| | | | CoV1 | | | | Human Patient | | TFTGYYMHWVRQAPGQGLEWMGWIS | |
| | | | | | | | | | PVSGGTNYAQKFQGRVTMTRDTSISTAY | |
| | | | | | | | | | MELSRLRSDDTAVYYCARAPLFPTGVLA | |
| | | | | | | | | | GDYYYYGMDVWGQGTTVTVSS | |
| C122 | Ab | SARS-CoV2 | SARS- | SARS-CoV2 | SARS-CoV1 | S; RBD | B-cells; SARS-CoV2 | 169 | EVQLVESGGGLIQPGGSLRLSCAASGLT | 1248 |
| | | | CoV1 | | | | Human Patient | | VSSNYMSWVRQAPGKGLEWVSVLYSG | |
| | | | | | | | | | GSSFYADSVKGRFTISRDNSKNTLYLQM | |
| | | | | | | | | | NSLRAEDTAVYYCARESGDTTMAFDYW | |
| | | | | | | | | | GQGTLVTVSS | |
| C123 | Ab | SARS-CoV2 | SARS- | SARS-CoV2 | SARS-CoV1 | S; RBD | B-cells; SARS-CoV2 | 170 | EVQLVESGGGLIQPGGSLRLSCAASGVT | 1249 |
| | | | CoV1 | | | | Human Patient | | VSRNYMSWVRQAPGKGLEWVSVIYSG | |
| | | | | | | | | | GSTYYADSVKGRFTISRDNSKNTLYLQM | |
| | | | | | | | | | NSLRAEDTAVYYCARDLSAAFDIWGQG | |
| | | | | | | | | | TMVTVSS | |
| C124 | Ab | SARS-CoV2 | SARS- | SARS-CoV2 | SARS-CoV1 | S; RBD | B-cells; SARS-CoV2 | 171 | EVQLVESGGGLVQPGGSLRLSCAASGFT | 1250 |
| | | | CoV1 | (weak) | | | Human Patient | | FSGYSMNWVRQAPGKGPEWVSYISRSS | |
| | | | | | | | | | STIYYADSVKGRFTISRDNAKNSLYLQMN | |
| | | | | | | | | | SLRDEDTAVYYCAREGARVGATYDTYYF | |
| | | | | | | | | | DYWGQGTLVTVSS | |
| C125 | Ab | SARS-CoV2 | SARS- | SARS-CoV2 | SARS-CoV1 | S; RBD | B-cells; SARS-CoV2 | 172 | QVQLVQSGPEVKKPGTSVKVSCKASGFT | 1251 |
| | | | CoV1 | | | | Human Patient | | FTSSAVQWVRQARGQRLEWIGWIVVG | |
| | | | | | | | | | SGNTNYAQKFQERVTITRDMSTSTAYM | |
| | | | | | | | | | ELSSLRSEDTAVYYCAAPYCSGGSCSDAF | |
| | | | | | | | | | DIWGQGTMVTVSS | |
| C126 | Ab | SARS-CoV2 | SARS- | | SARS-CoV1, | S; RBD | B-cells; SARS-CoV2 | 173 | QVQLQESGPGLVKPSETLSLSCAVSGGSI | 1252 |
| | | | CoV1 | | SARS-CoV2 | | Human Patient | | GSYFWSWIRQPPGKGLEWIGYLHYSGS | |
| | | | | | | | | | TNYNPSLKSRVTISVDTSKNQFSLKLSSVT | |
| | | | | | | | | | AADTAVYYCARLQWLRGAFDIWGQGT | |
| | | | | | | | | | MVTVSS | |
| C127 | Ab | SARS-CoV2 | SARS- | SARS-CoV2 | SARS-CoV1 | S; RBD | B-cells; SARS-CoV2 | 174 | QVQLVQSGAEVKKPGASVKVSCKASGY | 1253 |
| | | | CoV1 | | | | Human Patient | | TFTGYYMHWVRQAPGQGLEWMGWI | |
| | | | | | | | | | NPNSGGTNYAQKFQGRVTMTRDTSIST | |
| | | | | | | | | | AYMELSRLRSDDTAVYYCATAHPRRIQG | |
| | | | | | | | | | VFFLGPGVWGQGTTVTVSS | |
| C128 | Ab | SARS-CoV2 | SARS- | SARS-CoV2 | SARS-CoV1 | S; RBD | B-cells; SARS-CoV2 | 175 | EVQLLESGGGLVQPGGSLRLSCAASGFT | 1254 |
| | | | CoV1 | | | | Human Patient | | FSTYAMSWVRQAPGKGLEWVSTITGSG | |
| | | | | | | | | | RDTYYADSVKGRFTISRDNSKNTLFLQLN | |
| | | | | | | | | | SLRAEDAAVYSCANHPLASGDDYYHYY | |
| | | | | | | | | | MDVWGKGTTVTVSS | |
| C130 | Ab | SARS-CoV2 | SARS- | | SARS-CoV1, | S; RBD | B-cells; SARS-CoV2 | 176 | QVQLVQSGAEVKKPGASVKVSCKASGY | 1255 |
| | | | CoV1 | | SARS-CoV2 | | Human Patient | | TFTNYYMHWVRQAPGQGLEWMGIINP | |
| | | | | | | | | | SGGSTGYAQKFQGRVTMTRDTSTSTVY | |
| | | | | | | | | | MELSSLRSEDTAVYYCARSRPTPDWYFD | |
| | | | | | | | | | LWGRGTLVTVSS | |
| C131 | Ab | SARS-CoV2 | SARS- | SARS-CoV2 | SARS-CoV1 | S; RBD | B-cells; SARS-CoV2 | 177 | QVQLVQSGSEVKKPGSSVKVSCKASGG | 1256 |
| | | | CoV1 | | | | Human Patient | | TFSSYAFSWVRQAPGQGLEWMGRIIPIL | |
| | | | | | | | | | ALANYAQKFQGRVTITADKSTSTAYMEL | |
| | | | | | | | | | SSLRSEDTAVYYCARVNQAVTTPFSMDV | |
| | | | | | | | | | WGQGTTVTVSS | |
| C132 | Ab | SARS-CoV2 | SARS- | SARS-CoV2 | SARS-CoV1 | S; RBD | B-cells; SARS-CoV2 | 178 | QVQLQESGPGLVKPSGTLSLTCAVSGGS | 1257 |
| | | | CoV1 | (weak) | | | Human Patient | | ISSNNWWSCVRQPPGKGLEWIGEIYHS | |
| | | | | | | | | | GSTNYNPSLKSRVTISVDKSKNQFSLKLSS | |
| | | | | | | | | | VTAADTAVYYCARGGDTAMGPEYFDY | |
| | | | | | | | | | WGQGTLVTVSS | |

| | | | | | | SEQ | | SEQ | | |
|---|---|---|---|---|---|---|---|---|---|---|
| | | Heavy V | Heavy J | Light V | Light J | ID | | ID | | |
| Name | VL | Gene | Gene | Gene | Gene | NO.: | CDRH3 | NO.: | CDRL3 | Sources |
| C118 | QPVLTQSPSASASLGASVKLTCTLSSGH | IGHV3-30 | IGHJ6 | IGLV4-69 | IGLJ3 | 2253 | ASGYTGYDYF | 3455 | QTWGTGIL | Davide Robbiani et al., |
| | SSYAIAWHQQQPEKGPRYLMKLNTD | (Human) | (Human) | (Human) | (Human) | | VRGDYYGLD | | V | 2020 |
| | GSHSKGDGIPDRFSGSSSGAERYLTISS | | | | | | V | | | (https://www.nature.co |
| | LQSEDEADYYCQTWGTGILVFGGGTK | | | | | | | | | m/articles/s41586-020- |
| | LTVL | | | | | | | | | 2456-9) |
| C119 | QSALTQPASVSGSPGQSITISCTGTSSD | IGHV1-46 | IGHJ6 | IGLV2-14 | IGLJ3 | 2254 | ARANHETTM | 3456 | SSYTSSST | Davide Robbiani et al., |
| | VGGYKYVSWYQRHPGKAPKLMIYDV | (Human) | (Human) | (Human) | (Human) | | DTYYYYYYMD | | SVV | 2020 |
| | SNRPSGVSNRFSGSKSGNTASLTISGL | | | | | | V | | | (https://www.nature.co |
| | QAEDEADYYCSSYTSSSTSVVFGGGTQ | | | | | | | | | m/articles/s41586-020- |
| | LTVL | | | | | | | | | 2456-9) |
| C120 | AIRMITQSPSSLSASVGDTVTITCQASQ | IGHV3-53 | IGHJ4 | IGKV1-33 | IGKJ4 | 2255 | AREGMGMA | 3457 | QQYDNLP | Davide Robbiani et al., |
| | DISKYLNWYQQKPGKAPKLLIYDASNL | (Human) | (Human) | (Human) | (Human) | | AAGT | | QT | 2020 |
| | ETGVPSRFSGSGSGTDFTFTISSLQPED | | | | | | | | | (https://www.nature.co |
| | IATYYCQQYDNLPQTFGGGTKVEIK | | | | | | | | | m/articles/s41586-020- |
| | | | | | | | | | | 2456-9) |
| C121 | QSALTQPASVSGSPGQSITISCTGTSSD | IGHV1-2 | IGHJ6 | IGLV2-23 | IGLJ3 | 2256 | ARAPLFPTGV | 3458 | CSYAGSST | Davide Robbiani et al., |
| | VGSYNLVSWYQQHPGKAPKLMIYEGS | (Human) | (Human) | (Human) | (Human) | | LAGDYYYYG | | LV | 2020 |
| | KRPSGVSNRFSGSKSGNTASLTISGLQ | | | | | | MDV | | | (https://www.nature.co |
| | AEDEADYYCCSYAGSSTLVFGGGTKLT | | | | | | | | | m/articles/s41586-020- |
| | VL | | | | | | | | | 2456-9) |
| C122 | DIQLTQSPSFLSASVGDRVTITCRASQG | IGHV3-53 | IGHJ4 | IGKV1-9 | IGKJ2 | 2257 | ARESGDTTM | 3459 | QQLNSDSY | Davide Robbiani et al., |
| | ISSYLAWYQQKPGKAPKLLIYAASTLQS | (Human) | (Human) | (Human) | (Human) | | AFDY | | T | 2020 |
| | GVPSRFSGSGSGTEFTLTISSLQPEDFA | | | | | | | | | (https://www.nature.co |
| | TYYCQQLNSDSYTFGQGTKLEIK | | | | | | | | | m/articles/s41586-020- |
| | | | | | | | | | | 2456-9) |
| C123 | DIQLTQSPSFLSASVGDRVTITCRASQG | IGHV3-53 | IGHJ3 | IGKV1-9 | IGKJ5 | 2258 | ARDLSAAFDI | 3460 | QQLNSYPP | Davide Robbiani et al., |
| | ISSYLAWYQQKPGKAPKLLIYAASTLQS | (Human) | (Human) | (Human) | (Human) | | | | A | 2020 |
| | GVPSRFSGSGSGTEFTLTISSLQPEDFA | | | | | | | | | (https://www.nature.co |
| | TYYCQQLNSYPPAFGQGTRLEIK | | | | | | | | | m/articles/s41586-020- |
| | | | | | | | | | | 2456-9) |
| C124 | EIVLTQSPATLSLSPGERATLSCRASQSF | IGHV3-48 | IGHJ4 | IGKV3-11 | IGKJ1 | 2259 | AREGARVGA | 3461 | QQRNNW | Davide Robbiani et al. |
| | SSYLAWYQQKPGQAPRLLIYDASNRA | (Human) | (Human) | (Human) | (Human) | | TYDTYYFDY | | PPEWT | 2020 |
| | TGIPARFSGSGSGTDFTLTISSLEPEDFA | | | | | | | | | (https://www.nature.co |
| | VYYCQQRNNWPPEWTFGQGTKVEIK | | | | | | | | | m/articles/s41586-020- |
| | | | | | | | | | | 2456-9) |
| C125 | EIVLTQSPGTLSLSPGERATLSCRASQS | IGHV1-58 | IGHJ3 | IGKV3-20 | IGKJ1 | 2260 | AAPYCSGGSC | 3462 | QQYGSSP | Davide Robbiani et al. |
| | VSSSYLAWYQQKPGQAPRLLIYGASSR | (Human) | (Human) | (Human) | (Human) | | SDAFDI | | WT | 2020 |
| | ATGIPDRFSGSGSGTDFTLTISRLEPED | | | | | | | | | (https://www.nature.co |
| | FAVYYCQQYGSSPWTFGQGTKVEIK | | | | | | | | | m/articles/s41586-020- |
| | | | | | | | | | | 2456-9) |
| C126 | NFMLTQPHSVSESPGKTVTISCTGSSG | IGHV4-59 | IGHJ3 | IGLV6-57 | IGLJ3 | 2261 | ARLQWLRGA | 3463 | QSYDSSNL | Davide Robbiani et al., |
| | SIASNYVQWYQQRPGSAPTTVINEDN | (Human) | (Human) | (Human) | (Human) | | FDI | | V | 2020 |
| | QRPSGVPDRFSGSIDSSSNSASLTISGL | | | | | | | | | (https://www.nature.co |
| | KTEDEADYYCQSYDSSNLVFGGGTKLT | | | | | | | | | m/articles/s41586-020- |
| | VL | | | | | | | | | 2456-9) |
| C127 | QSVLTQPPSASGTPGQRVTISCSGSSS | IGHV1-2 | IGHJ6 | IGLV1-44 | IGLJ3 | 2262 | ATAHPRRIQG | 3464 | AAWDDSL | Davide Robbiani et al., |
| | NIGSNTVNWYQQLPGTAPKLLIYSNN | (Human) | (Human) | (Human) | (Human) | | VFFLGPGV | | NGVV | 2020 |
| | QRPSGVPDRFSGSKSGTSASLAISGLQ | | | | | | | | | (https://www.nature.co |
| | SEDEADYYCAAWDDSLNGVVFGGGT | | | | | | | | | m/articles/s41586-020- |
| | KLTVL | | | | | | | | | 2456-9) |
| C128 | EIVLTQSPGTLSLSPGERATLSCRASQS | IGHV3-23 | IGHJ6 | IGKV3-20 | IGKJ4 | 2263 | ANHPLASGD | 3465 | QQYGSSRA | Davide Robbiani et al., |
| | VNSRQLAWYQQKPGQAPRLLIYGASS | (Human) | (Human) | (Human) | (Human) | | DYYHYYMDV | | LT | 2020 |
| | RATGIPERFSGSGSGTDFTLTISRLESED | | | | | | | | | (https://www.nature.co |
| | FAVYHCQQYGSSRALTFGGGTKVEIK | | | | | | | | | m/articles/s41586-020- |
| | | | | | | | | | | 2456-9) |
| C130 | SYELTQPPSVSVAPGKTARITCGGNNI | IGHV1-46 | IGHJ2 | IGLV3-21 | IGLJ3 | 2264 | ARSRPTPDW | 3466 | QVWDSSS | Davide Robbiani et al. |
| | GSKSVHWYQQKPGQAPVLVIYYDSDR | (Human) | (Human) | (Human) | (Human) | | YFDL | | DHPGVV | 2020 |
| | PSGIPERFSGSNSGNTATLTISRVEAGD | | | | | | | | | (https://www.nature.co |
| | EADYYCQVWDSSSDHPGVVFGGGTK | | | | | | | | | m/articles/s41586-020- |
| | LTVL | | | | | | | | | 2456-9) |
| C131 | EIVMTQSPATLSVSPGERATLSCRASQ | IGHV1-69 | IGHJ6 | IGKV3-15 | IGKJ5 | 2265 | ARVNQAVTT | 3467 | QQYNNWP | Davide Robbiani et al., |
| | SVSSNLAWYQQKPGQAPRLLIYGAST | (Human) | (Human) | (Human) | (Human) | | PFSMDV | | IT | 2020 |
| | RATGIPARFSGSGSGTEFTLTISSLQSE | | | | | | | | | (https://www.nature.co |
| | DFAVYYCQQYNNWPITFGQGTRLEIK | | | | | | | | | m/articles/s41586-020- |
| | | | | | | | | | | 2456-9) |
| C132 | QSALTQPASVSGSPGQSITISCTGTSSD | IGHV4-4 | IGHJ4 | IGLV2-14 | IGLJ3 | 2266 | ARGGDTAMG | 3468 | SSYTSSST | Davide Robbiani et al. |
| | VGGYNYVSWYQQHPGKAPKLMIYDV | (Human) | (Human) | (Human) | (Human) | | PEYFDY | | LL | 2020 |
| | SNRPSGVSNRFSGSKSGNTASLTISGL | | | | | | | | | (https://www.nature.co |
| | QAEDEADYYCSSYTSSSTLLFGGGTKLT | | | | | | | | | m/articles/s41586-020- |
| | VL | | | | | | | | | 2456-9) |

| | | | | | Not | | | | | |
|---|---|---|---|---|---|---|---|---|---|---|
| | Ab | | | Neutral- | Neutral- | | | SEQ | | SEQ |
| | or | | Doesn't | ising | ising | Protein + | | ID | | ID |
| Name | Nb | Binds to | Bind to | Vs | Vs | Epitope | Origin | NO.: | VH or VHH | NO.: |
| C133 | Ab | SARS-CoV2 | SARS- | | SARS-CoV1, | S; RBD | B-cells; SARS-CoV2 | 179 | QVQLVESGGGVVQPGRSLRLSCAASGF | 1258 |
| | | | CoV1 | | SARS-CoV2 | | Human Patient | | TFSSYAMHWVRQAPGKGLEWVAVILY | |
| | | | | | | | | | DGSNKYYADSVKGRFTISRDNSKNTLYL | |
| | | | | | | | | | QMNSLRAEDTAVYYCARDSDVDTSMVT | |
| | | | | | | | | | WFDYWGQGTLVTVSS | |
| C134 | Ab | SARS-CoV2 | SARS- | | SARS-CoV1, | S; RBD | B-cells; SARS-CoV2 | 180 | EVQLLESGGGLVQPGGSLRLSCAASGFT | 1259 |
| | | | CoV1 | | SARS-CoV2 | | Human Patient | | FSNYAMSWVRQAPGKGLEWVSAISGS | |
| | | | | | | | | | DGSTYYAGSVKGRFTISRDNSKNTLYLQ | |
| | | | | | | | | | MNSLRAEDTAVYYCAKDPLITGPTYQYF | |
| | | | | | | | | | HYWGQGTLVTVSS | |
| C135 | Ab | SARS-CoV2 | SARS- | SARS-CoV2 | SARS-CoV1 | S; RBD | B-cells; SARS-CoV2 | 181 | QVQLVESGGGVVQPGRSLRLSCAASGF | 1260 |
| | | | CoV1 | | | | Human Patient | | TFSSYAMHWVRQAPGKGLEWVAVIPF | |
| | | | | | | | | | DGRNKYYADSVTGRFTISRDNSKNTLYL | |
| | | | | | | | | | QMNSLRAEDTAVYYCASSSGYLFHSDY | |
| | | | | | | | | | WGQGTLVTVSS | |
| C138 | Ab | SARS-CoV2 | SARS- | | SARS-CoV1, | S; RBD | B-cells; SARS-CoV2 | 182 | EVQLVESGGGLVQPGGSLRLSCAASGFT | 1261 |
| | | | CoV1 | | SARS-CoV2 | | Human Patient | | FSTYWMSWVRQPPGKGLEWVANIKQ | |
| | | | | | | | | | DGSEKYYVDSVKGRFTISRDNAKNSLYL | |
| | | | | | | | | | QMNSLRADDTAVYYCAGGTWLRSSFDY | |
| | | | | | | | | | WGQGTLVTVSS | |
| C139 | Ab | SARS-CoV2 | SARS- | | SARS-CoV1, | S; RBD | B-cells; SARS-CoV2 | 183 | EVQLVESGGGVVQPGRSLRLSCAASGFT | 1262 |
| | | | CoV1 | | SARS-CoV2 | | Human Patient | | FSSYAMHWVRQAPGKGLEWVAVISYD | |
| | | | | | | | | | GSNKYSADSVKGRFTISRDNSKNTLYLQ | |
| | | | | | | | | | MNSLRAEDTAVYYCAKGGAYSYYYYMD | |
| | | | | | | | | | VWGKGTTVTVSS | |
| C140 | Ab | SARS-CoV2 | SARS- | SARS-CoV2 | SARS-CoV1 | S; RBD | B-cells; SARS-CoV2 | 184 | EVQLVESGGGLVQPGGSLRLSCAASGVT | 1263 |
| | | | CoV1 | | | | Human Patient | | VSSNYMSWVRQAPGKGLEWVSLIYSGG | |
| | | | | | | | | | STFYADSVKGRFTISRDNSENTLYLQMN | |
| | | | | | | | | | TLRAEDTAVYYCARDLYYYGMDVWGQ | |
| | | | | | | | | | GTTVTVSS | |
| C141 | Ab | SARS-CoV2 | SARS- | | SARS-CoV1, | S; RBD | B-cells; SARS-CoV2 | 185 | EVQLVESGGGVVQPGRSLRLSCAASGFT | 1264 |
| | | | CoV1 | | SARS-CoV2 | | Human Patient | | FSSYAMFWVRQAPGKGLEWVAVISYD | |
| | | | | | | | | | GSNKYYADSVKGRFTISRDNSKNTLYLQ | |
| | | | | | | | | | MNSLRAEDTAVYYCARADLGYCTNGVC | |
| | | | | | | | | | YVDYWGQGTLVTVSS | |
| C143 | Ab | SARS-CoV2 | SARS- | | SARS-CoV1, | S; RBD | B-cells; SARS-CoV2 | 186 | EVQLVESGGGLVQPGGSLRLSCAASGFS | 1265 |
| | | | CoV1 | | SARS-CoV2 | | Human Patient | | VSTKYMTWVRQAPGKGLEWVSVLYSG | |
| | | | | | | | | | GSDYYADSVKGRFTISRDNSKNALYLQM | |
| | | | | | | | | | NSLRVEDTGVYYCARDSSEVRDHPGHP | |
| | | | | | | | | | GRSVGAFDIWGQGTMVTVSS | |
| C144 | Ab | SARS-CoV2 | SARS- | SARS-CoV2 | SARS-CoV1 | S; RBD | B-cells; SARS-CoV2 | 187 | EVQLVESGGGLIQPGGSLRLSCAASGFT | 1266 |
| | | | CoV1 | | | | Human Patient | | VSNNYMSWVRQAPGKGLEWVSVIYSG | |
| | | | | | | | | | GSTYYADSVKGRFTISRDKSKNTLYLQM | |
| | | | | | | | | | NRLRAEDTAVYYCAREGEVEGYNDFWS | |
| | | | | | | | | | GYSRDRYYFDYWGQGTLVTVSS | |
| C145 | Ab | SARS-CoV2 | SARS- | SARS-CoV2 | SARS-CoV1 | S; RBD | B-cells; SARS-CoV2 | 188 | EVQLVESGGGLIQPGGSLRLSCAASGFS | 1267 |
| | | | CoV1 | | | | Human Patient | | VSSNYMSWVRQAPGKGLEWVSVIYSG | |
| | | | | | | | | | GSTYYADSVKGRFTISRDNSKNTLYLQM | |
| | | | | | | | | | NSLRAEDTAVYYCAREGEVEGYYDFWS | |
| | | | | | | | | | GYSRDRYYFDYWGQGTLVTVSS | |
| C146 | Ab | SARS-CoV2 | SARS- | | SARS-CoV1, | S; non- | B-cells; SARS-CoV2 | 189 | EVQLVESGGGLVKPGGSLRLSCAASGLT | 1268 |
| | | | CoV1 | | SARS-CoV2 | RBD | Human Patient | | FTAYRMNWVRQAPGKGLEWLSSISNTN | |
| | | | | | | | | | GDIYYADSVKGRFTISRDNAKNSLYLQM | |
| | | | | | | | | | NSLRADDTAVYYCARDVASNYAYFDLW | |
| | | | | | | | | | GQGTLVTVSS | |
| C147 | Ab | SARS-CoV2 | SARS- | | SARS-CoV1, | S; non- | B-cells; SARS-CoV2 | 190 | EVQLVQSGAEVKKPGESLKISCKGSGYR | 1269 |
| | | | CoV1 | | SARS-CoV2 | RBD | Human Patient | | FTNYWIGWVRQMPGKGLEWMGIIYPG | |
| | | | | | | | | | DSDTRYSPSFQGQVTISADKSITTAYLQW | |
| | | | | | | | | | SSLKASDTAMYYCARLSDRWYSPFDPW | |
| | | | | | | | | | GQGTLVTVSS | |
| C148 | Ab | SARS-CoV2 | SARS- | | SARS-CoV1, | S; RBD | B-cells; SARS-CoV2 | 191 | EVQLVESGGGLVQPGGSQRLSCAASGF | 1270 |
| | | | CoV1 | | SARS-CoV2 | | Human Patient | | TVSSNYMSWIRQAPGKGLEWVSVIYSG | |
| | | | | | | | | | GSAYYVDSVKGRFTISRDNSKNTLYLQM | |
| | | | | | | | | | NSLRPEDTAVYYCARIANYMDVWGKGT | |
| | | | | | | | | | TVTVSS | |
| C150 | Ab | SARS-CoV2 | SARS- | | SARS-CoV1, | S; RBD | B-cells; SARS-CoV2 | 192 | EVQLVESGGGLVQPGGSLRLSCVASGFT | 1271 |
| | | | CoV1 | | SARS-CoV2 | | Human Patient | | FSSYWMHWVRQVPGKGPVWVSHINS | |
| | | | | | | | | | EGSSTNYADSVRGRFTISRDNAKDTLYL | |
| | | | | | | | | | QMNNLRAEDTAVYYCARPTAVAAAGN | |
| | | | | | | | | | YFYYYGMDVWGQGTTVTVSS | |

| | | | | | | SEQ | | SEQ | | |
|---|---|---|---|---|---|---|---|---|---|---|
| | | Heavy V | Heavy J | Light V | Light J | ID | | ID | | |
| Name | VL | Gene | Gene | Gene | Gene | NO.: | CDRH3 | NO.: | CDRL3 | Sources |
| C133 | DIQMTQSPSSLSASVGDRVTITCRASQ | IGHV3-30 | IGHJ4 | IGKV1-39 | IGKJ1 | 2267 | ARDSDVDTS | 3469 | QQSYSTPP | Davide Robbiani et al., |
| | SISSYLNWYQQKPGKAPKLLIYAASSLQ | (Human) | (Human) | (Human) | (Human) | | MVTWFDY | | WT | 2020 |
| | SGVPSRFSGSGSGTDFTLTISSLQPEDF | | | | | | | | | (https://www.nature.co |
| | ATYYCQQSYSTPPWTFGQGTKVEIK | | | | | | | | | m/articles/s41586-020- |
| | | | | | | | | | | 2456-9) |
| C134 | SYELTQPPSVSVAPGKTARITCGGNNI | IGHV3-23 | IGHJ4 | IGLV3-21 | IGLJ3 | 2268 | AKDPLITGPTY | 3470 | QVWDSSS | Davide Robbiani et al., |
| | GSKSVHWYQQKPGQAPVLVIYYDSDR | (Human) | (Human) | (Human) | (Human) | | QYFHY | | DRPGVV | 2020 |
| | PSGIPERFSGSNSGNTATLTISRVEAGD | | | | | | | | | (https://www.nature.co |
| | EAEYHCQVWDSSSDRPGVVFGGGTK | | | | | | | | | m/articles/s41586-020- |
| | LTVL | | | | | | | | | 2456-9) |
| C135 | DIQMTQSPSTLSASVGDRVTITCRASQ | IGHV3-30 | IGHJ4 | IGKV1-5 | IGKJ1 | 2269 | ASSSGYLFHS | 3471 | QQYNSYP | Davide Robbiani et al., |
| | SISNWLAWFQQKPGKAPKLLIYEASSL | (Human) | (Human) | (Human) | (Human) | | DY | | WT | 2020 |
| | ESGVPSRFSGSGSGTEFTLTISSLQPDD | | | | | | | | | (https://www.nature.co |
| | FATYYCQQYNSYPWTFGQGTKVEIK | | | | | | | | | m/articles/s41586-020- |
| | | | | | | | | | | 2456-9) |
| C138 | NFMLTQPHSVSESPGKTVTISCTGSSG | IGHV3-7 | IGHJ4 | IGLV6-57 | IGLJ3 | 2270 | AGGTWLRSSF | 3472 | QSYDSSN | Davide Robbiani et al., |
| | SIASNYVQWYQQRPGSAPTTVIYEDN | (Human) | (Human) | (Human) | (Human) | | DY | | WV | 2020 |
| | QRPSGVPDRFSGSIDSSSNSASLTISGL | | | | | | | | | (https://www.nature.co |
| | KTEDEADYYCQSYDSSNWVFGGGTKL | | | | | | | | | m/articles/s41586-020- |
| | TVL | | | | | | | | | 2456-9) |
| C139 | DIQMTQSPSSLSASVGDRVTITCQASQ | IGHV3-30- | IGHJ6 | IGKV1-33 | IGKJ4 | 2271 | AKGGAYSYYY | 3473 | QQYDNLPL | Davide Robbiani et al., |
| | DISNYLNWYQQKPGKAPKLLIYDASNL | 3 | (Human) | (Human) | (Human) | | YMDV | | T | 2020 |
| | ETGVPSRFSGSGSGTDFTFTISSLQPED | (Human) | | | | | | | | (https://www.nature.co |
| | IATYYCQQYDNLPLTFGGGTKVEIK | | | | | | | | | m/articles/s41586-020- |
| | | | | | | | | | | 2456-9) |
| C140 | DIQLTQSPSFLSASVGDRVTITCRASQG | IGHV3-66 | IGHJ6 | IGKV1-9 | IGKJ2 | 2272 | ARDLYYYGM | 3474 | QQLNSYSY | Davide Robbiani et al., |
| | ISSYLAWYQQKPGKAPKLLIYAASTLQS | (Human) | (Human) | (Human) | (Human) | | DV | | T | 2020 |
| | GVPSRFSGSGSGTEFTLTISSLQPEDFA | | | | | | | | | (https://www.nature.co |
| | TYYCQQLNSYSYTFGQGTKLEIK | | | | | | | | | m/articles/s41586-020- |
| | | | | | | | | | | 2456-9) |
| C141 | NFMLTQPHSVSESPGKTVTISCTGSSG | IGHV3-30 | IGHJ4 | IGLV6-57 | IGLJ3 | 2273 | ARADLGYCTN | 3475 | QSYDSSN | Davide Robbiani et al. |
| | SIASNYVQWYQQRPGSAPTTVIYEDN | (Human) | (Human) | (Human) | (Human) | | GVCYVDY | | WV | 2020 |
| | QRPSGVPDRFSGSIDSSSNSASLTISGL | | | | | | | | | (https://www.nature.co |
| | KTEDEADYYCQSYDSSNWVFGGGTKL | | | | | | | | | m/articles/s41586-020- |
| | TVL | | | | | | | | | 2456-9) |
| C143 | QSALTQPASVSGSPGQSITISCTGTSND | IGHV3-66 | IGHJ3 | IGLV2-23 | IGLJ3 | 2274 | ARDSSEVRDH | 3476 | CSYAGAST | Davide Robbiani et al., |
| | VGSYTLVSWYQQYPGKAPKLLIFEGTK | (Human) | (Human) | (Human) | (Human) | | PGHPGRSVG | | FV | 2020 |
| | RSSGISNRFSGSKSGNTASLTISGLQGE | | | | | | AFDI | | | (https://www.nature.co |
| | DEADYYCCSYAGASTFVFGGGTKLTVL | | | | | | | | | m/articles/s41586-020- |
| | | | | | | | | | | 2456-9) |
| C144 | QSALTQPASVSGSPGQSITISCTGTSSD | IGHV3-53 | IGHJ4 | IGLV2-14 | IGLJ1 | 2275 | AREGEVEGY | 3477 | SSYTSSST | Davide Robbiani et al., |
| | VGGYNYVSWYQQHPGKAPKLMIYDV | (Human) | (Human) | (Human) | (Human) | | NDFWSGYSR | | RV | 2020 |
| | SNRPSGVSNRFSGSKSGNTASLTISGL | | | | | | DRYYFDY | | | (https://www.nature.co |
| | QAEDEADYYCSSYTSSSTRVFGTGTKV | | | | | | | | | m/articles/s41586-020- |
| | TVL | | | | | | | | | 2456-9) |
| C145 | QSALTQPASVSGSPGQSITISCTGTSSD | IGHV3-53 | IGHJ4 | IGLV2-14 | IGLJ1 | 2276 | AREGEVEGYY | 3478 | SSYTSSTT | Davide Robbiani et al., |
| | VGGYNYVSWYQQHPGKAPKLMIYDV | (Human) | (Human) | (Human) | (Human) | | DFWSGYSRD | | RV | 2020 |
| | SNRPSGVSNRFSGSKSGNTASLTISGL | | | | | | RYYFDY | | | (https://www.nature.co |
| | QAEDEADYYCSSYTSSTTRVFGTGTRV | | | | | | | | | m/articles/s41586-020- |
| | TVL | | | | | | | | | 2456-9) |
| C146 | QSALTQPASVSGSPGQSITISCTGTSSD | IGHV3-21 | IGHJ4 | IGLV2-14 | IGLJ1 | 2277 | ARDVASNYAY | 3479 | SSYRGSST | Davide Robbiani et al., |
| | IGVYNYISWSQQHPGKAPKVMIYDVT | (Human) | (Human) | (Human) | (Human) | | FDL | | PYV | 2020 |
| | NRPSGVSNRFSGSKSGNTASLTISGLQ | | | | | | | | | (https://www.nature.co |
| | AEDEADYYCSSYRGSSTPYVFGTGTKV | | | | | | | | | m/articles/s41586-020- |
| | TVL | | | | | | | | | 2456-9) |
| C147 | QAVVTQEPSLTVSPGGTVTLTCGSSTG | IGHV5-51 | IGHJ5 | IGLV7-46 | IGLJ3 | 2278 | ARLSDRWYSP | 3480 | LLSYSGAR | Davide Robbiani et al., |
| | AVTSGHYPYWFQQKSGQAPRTLIYETS | (Human) | (Human) | (Human) | (Human) | | FDP | | PV | 2020 |
| | IKHSWTPARFSGSLLGGKAALTLSGAQ | | | | | | | | | (https://www.nature.co |
| | PEDEADYYCLLSYSGARPVFGGGTKLT | | | | | | | | | m/articles/s41586-020- |
| | VL | | | | | | | | | 2456-9) |
| C148 | EIVMTQSPATLSVSPGERATLSCRASQ | IGHV3-66 | IGHJ6 | IGKV3-15 | IGKJ4 | 2279 | ARIANYMDV | 3481 | QQYNNWP | Davide Robbiani et al., |
| | SVSSHLAWYQQKPGQAPRLLIYGAST | (Human) | (Human) | (Human) | (Human) | | | | PLT | 2020 |
| | RATGIPTRFSGSGSGTEFTLTISSLQSED | | | | | | | | | (https://www.nature.co |
| | FAVYYCQQYNNWPPLTFGGGTKVEIK | | | | | | | | | m/articles/s41586-020- |
| | | | | | | | | | | 2456-9) |
| C150 | QSALTQPASVSGSPGQSITISCTGTSSD | IGHV3-74 | IGHJ6 | IGLV2-14 | IGLJ3 | 2280 | ARPTAVAAA | 3482 | SSYRSSST | Davide Robbiani et al., |
| | VGYYNFVSWYQQHPGKAPKLMIYEVS | (Human) | (Human) | (Human) | (Human) | | GNYFYYYGM | | LV | 2020 |
| | NRPSGVSNRFSGSKSGNTASLIISGLQA | | | | | | DV | | | (https://www.nature.co |
| | EDEADYYCSSYRSSSTLVFGGGTKLTVL | | | | | | | | | m/articles/s41586-020- |
| | | | | | | | | | | 2456-9) |

| | | | | | Not | | | | | |
|---|---|---|---|---|---|---|---|---|---|---|
| | Ab | | | Neutral- | Neutral- | | | SEQ | | SEQ |
| | or | | Doesn't | ising | ising | Protein + | | ID | | ID |
| Name | Nb | Binds to | Bind to | Vs | Vs | Epitope | Origin | NO.: | VH or VHH | NO.: |
| C151 | Ab | SARS-CoV2 | SARS- | SARS-CoV2 | SARS-CoV1 | S; RBD | B-cells; SARS-CoV2 | 193 | EVQLVESGGGLVKPGGSLRLSCAASGFT | 1272 |
| | | | CoV1 | (weak) | | | Human Patient | | FSSYNMNWVRQAPGKGLEWVSCISSSS | |
| | | | | | | | | | SYIYYADSVKGRFTISRDNAKNSLYLQMN | |
| | | | | | | | | | SLRAEDTAVYYCARERGYDGGKTPPFLG | |
| | | | | | | | | | GQGTLVTVSS | |
| C153 | Ab | SARS-CoV2 | SARS- | SARS-CoV2 | SARS-CoV1 | S; RBD | B-cells; SARS-CoV2 | 194 | EVQLVESGGGLIQPGGSLRLSCAASGFT | 1273 |
| | | | CoV1 | (weak) | | | Human Patient | | VSSNYMSWVRQAPGKGLEWVSVIYSGY | |
| | | | | | | | | | STYYVDSVKGRFTISRDNSKNTLYLQMN | |
| | | | | | | | | | SLRAEDTAVYYCARVGGAHSGYDGSFDY | |
| | | | | | | | | | WGQGTLVTVSS | |
| C154 | Ab | SARS-CoV1, | | SARS-CoV2 | | S; RBD | B-cells; SARS-CoV2 | 195 | QVQLVESGGGVVQPGRSLRLSCAASGF | 1274 |
| | | SARS-CoV2 | | (weak) | | | Human Patient | | TFSRYGMHWVRQAPGKGLEWVAVMS | |
| | | | | | | | | | YDGSSKYYADSVKGRFTISRDNSKNTLCL | |
| | | | | | | | | | QMNSLRAEDTAVYYCAKQAGPYCSGGS | |
| | | | | | | | | | CYSAPFDYWGQGTLVTVSS | |
| C155 | Ab | SARS-CoV2 | SARS- | SARS-CoV2 | SARS-CoV1 | S; RBD | B-cells; SARS-CoV2 | 196 | EVQLVESGGGLIQPGGSLRLSCAASGFIV | 1275 |
| | | | CoV1 | | | | Human Patient | | SSNYMSWVRQAPGKGLEWVSVIYSGG | |
| | | | | | | | | | STFYADSVKGRFTISRDNSKNTLYLQMN | |
| | | | | | | | | | SLRAEDTAVYYCARDFGEFYFDYWGQG | |
| | | | | | | | | | TLVTVSS | |
| C156 | Ab | SARS-CoV2 | SARS- | | SARS-CoV1, | S; RBD | B-cells; SARS-CoV2 | 197 | QVQLVESGGGVVQPGRSLRLSCAASGF | 1276 |
| | | | CoV1 | | SARS-CoV2 | | Human Patient | | TFSNYGMHWVRQAPGKGLEWVAVISY | |
| | | | | | | | | | DGNNKYYADSVKGRFTISRDNSKNTLYL | |
| | | | | | | | | | QMNSLRAEDTAVYYCAKDPFPLAVAGT | |
| | | | | | | | | | GYFDYWGQGTLVTVSS | |
| C164 | Ab | SARS-CoV2 | SARS- | SARS-CoV2 | SARS-CoV1 | S; RBD | B-cells; SARS-CoV2 | 198 | EVQLVESGGGLVQPGGSLRLSCAASGFS | 1277 |
| | | | CoV1 | (weak) | | | Human Patient | | VSTKYMTWVRQAPGKGLEWVSVLYSG | |
| | | | | | | | | | GSDYYADSVKGRFTISRDNSKNALYLQM | |
| | | | | | | | | | NSLRVEDTGVYYCARDSSEVRDHPGHP | |
| | | | | | | | | | GRSVGAFDIWGQGTMVTVSS | |
| C165 | Ab | SARS-CoV2 | SARS- | SARS-CoV2 | SARS-CoV1 | S; RBD | B-cells; SARS-CoV2 | 199 | QVQLVQSGAEVKKPGSSVKVSCKASGG | 1278 |
| | | | CoV1 | | | | Human Patient | | TFSSYAINWVRQAPGQGLEWMGRIIPI | |
| | | | | | | | | | VGIANYAQKFQGRVTITADKSSSTAYME | |
| | | | | | | | | | LSSLRSEDTAVYYCARDLLDPQLDDAFDI | |
| | | | | | | | | | WGQGTMVTVSS | |
| C201 | Ab | SARS-CoV2 | SARS- | | SARS-CoV1, | S; RBD | B-cells; SARS-CoV2 | 200 | EVQLVESGGGLVQPGRSLRLSCAASGFT | 1279 |
| | | | CoV1 | | SARS-CoV2 | | Human Patient | | FDDYAMHWVRQAPGKGLEWVSGISW | |
| | | | | | | | | | NSGSIGYADSVKGRFTISRDNAKNSLYLQ | |
| | | | | | | | | | MNSLRAEDTALYYCVKGVEYSSSSNFDY | |
| | | | | | | | | | WGQGTLVTVSS | |
| C202 | Ab | SARS-CoV2 | SARS- | | SARS-CoV1, | S; RBD | B-cells; SARS-CoV2 | 201 | EVQLVESGGGLVQPGGSLRLSCAASGFT | 1280 |
| | | | CoV1 | | SARS-CoV2 | | Human Patient | | VSSNYMSWVRQAPGKGLEWVSLIYSGG | |
| | | | | | | | | | STYYADSVKGRFTISRDNSKNTLYLQMN | |
| | | | | | | | | | SLRAEDTAVYYCARDTLGRGGDYWGQ | |
| | | | | | | | | | GTLVTVSS | |
| C204 | Ab | SARS-CoV1, | | | SARS-CoV2 | S; RBD | B-cells; SARS-CoV2 | 202 | EVQLLESGGGLEQPGGSLRLSCAASGFT | 1281 |
| | | SARS-CoV2 | | | | | Human Patient | | FSTYAMSWVRQAPGKGLEWVSAISGSG | |
| | | | | | | | | | AGTFYADSVKGRFTISRDNSKNTLYLQM | |
| | | | | | | | | | NSLRAEDTAVYYCARESDCGSTSCYQVG | |
| | | | | | | | | | WFDPWGQGTLVTVSS | |
| C205 | Ab | SARS-CoV2 | SARS- | | SARS-CoV1, | S; non- | B-cells; SARS-CoV2 | 203 | QVQLVQSGAEVKKPGASVKVSCKASGH | 1282 |
| | | | CoV1 | | SARS-CoV2 | RBD | Human Patient | | TFTSYYMHWVRQAPGQGLEWMGIINP | |
| | | | | | | | | | SGGSTSYAQKFQGRVTMTRDTSTSTVY | |
| | | | | | | | | | MELSSLRSEDTAVYYCARGPERGIVGAT | |
| | | | | | | | | | DYFDYWGQGTLVTVSS | |
| C207 | Ab | SARS-CoV2 | SARS- | SARS-CoV2 | SARS-CoV1 | S; RBD | B-cells; SARS-CoV2 | 204 | EVQLLESGGGLVQPGGSLRLSCAASGFT | 1283 |
| | | | CoV1 | (weak) | | | Human Patient | | FSSYAMSWVRQAPGKGLEWVSAISGSG | |
| | | | | | | | | | GSTYYADSVKGRFTISRDNSKNTLYLQM | |
| | | | | | | | | | NSLRAEDTAVYYCAKEPIGQPLLWWDY | |
| | | | | | | | | | WGQGTLVTVSS | |
| C208 | Ab | SARS-CoV2 | SARS- | | SARS-CoV1, | S; non- | B-cells; SARS-CoV2 | 205 | EVQLVQSGAEVKKPGESLKISCKGSGYSF | 1284 |
| | | | CoV1 | | SARS-CoV2 | RBD | Human Patient | | TSYWIGWVRQMPGKGLEWMGIIYPGD | |
| | | | | | | | | | SDTRYSPSFQGQVTISADKSISTAYLKWS | |
| | | | | | | | | | SLKASDSAMYYCARGPNLQNWFDPWG | |
| | | | | | | | | | QGTLVTVSS | |
| C210 | Ab | SARS-CoV2 | SARS- | SARS-CoV2 | SARS-CoV1 | S; RBD | B-cells; SARS-CoV2 | 206 | EVQLVESGGGLIQPGGSLRLSCAASGFT | 1285 |
| | | | CoV1 | | | | Human Patient | | VSSNYMSWVRQAPGKGLEWVSVIYSG | |
| | | | | | | | | | GSTFYADSVKGRFTFSRDNSKNTLYLQM | |
| | | | | | | | | | NSLRAEDTAVYYCARDLMAYGMDVWG | |
| | | | | | | | | | QGTTVTVSS | |

| | | | | | | SEQ | | SEQ | | |
|---|---|---|---|---|---|---|---|---|---|---|
| | | Heavy V | Heavy J | Light V | Light J | ID | | ID | | |
| Name | VL | Gene | Gene | Gene | Gene | NO.: | CDRH3 | NO.: | CDRL3 | Sources |
| C151 | NFMLTQPHSVSESPGKTVTISCTGSSG | IGHV3-21 | IGHJ4 | IGLV6-57 | IGLJ3 | 2281 | ARERGYDGG | 3483 | QSYDSSNY | Davide Robbiani et al., |
| | SIASNYVQWYQQRPGSAPTTVIYEDN | (Human) | (Human) | (Human) | (Human) | | KTPP | | WV | 2020 |
| | QRPSGVPDRFSGSIDSSSNSASLTISGL | | | | | | | | | (https://www.nature.co |
| | KTEDEADYYCQSYDSSNYWVFGGGTK | | | | | | | | | m/articles/s41586-020- |
| | LTVL | | | | | | | | | 2456-9) |
| C153 | QSALTQPASVSGSPGQSITISCTGTSSD | IGHV3-53 | IGHJ4 | IGLV2-23 | IGLJ3 | 2282 | ARVGGAHSG | 3484 | CSYAGSST | Davide Robbiani et al., |
| | VGSYNLVSWYQQHPGKAPKLMIYEGS | (Human) | (Human) | (Human) | (Human) | | YDGSFDY | | WV | 2020 |
| | KRPSGVSNRFSGSKSGNTASLTISGLQ | | | | | | | | | (https://www.nature.co |
| | AEDEADYYCCSYAGSSTWVFGGGTKL | | | | | | | | | m/articles/s41586-020- |
| | TVL | | | | | | | | | 2456-9) |
| C154 | DIQMTQSPSSLSASVGDRVTITCQASQ | IGHV3-30 | IGHJ4 | IGKV1-33 | IGKJ5 | 2283 | AKQAGPYCS | 3485 | QQYDNLPI | Davide Robbiani et al., |
| | GISNYLNWYQQKPGKAPKLLIYDASNL | (Human) | (Human) | (Human) | (Human) | | GGSCYSAPFD | | T | 2020 |
| | ETGVPSRFSGSGSGTDFTFTISSLQPED | | | | | | Y | | | (https://www.nature.co |
| | IATYYCQQYDNLPITFGQGTRLEIK | | | | | | | | | m/articles/s41586-020- |
| | | | | | | | | | | 2456-9) |
| C155 | EIVMTQSPATLSVSPGERATLSCRASQ | IGHV3-53 | IGHJ4 | IGKV3-15 | IGKJ1 | 2284 | ARDFGEFYFD | 3486 | QQYNNWP | Davide Robbiani et al., |
| | SVSSNLAWYQQKPGQAPRLLIYGAST | (Human) | (Human) | (Human) | (Human) | | Y | | RT | 2020 |
| | RATAIPARFSGSGSGTEFTLTISSLQSED | | | | | | | | | (https://www.nature.co |
| | FAVYYCQQYNNWPRTFGQGTKVEIK | | | | | | | | | m/articles/s41586-020- |
| | | | | | | | | | | 2456-9) |
| C156 | SYELTQPPSVSVAPGQTARISCGGNNI | IGHV3-30 | IGHJ4 | IGLV3-21 | IGLJ3 | 2285 | AKDPFPLAVA | 3487 | QVWDSSS | Davide Robbiani et al., |
| | GSKNVHWYQQKPGQAPVLVVYDDS | (Human) | (Human) | (Human) | (Human) | | GTGYFDY | | DPWV | 2020 |
| | DRPSGIPERFSGSNSGNTATLTISRVEA | | | | | | | | | (https://www.nature.co |
| | GDEADYYCQVWDSSSDPWVFGGGTK | | | | | | | | | m/articles/s41586-020- |
| | LTVL | | | | | | | | | 2456-9) |
| C164 | QSALTQPASVSGSPGQSITISCTGTSND | IGHV3-66 | IGHJ3 | IGLV2-23 | IGLJ3 | 2286 | ARDSSEVRDH | 3488 | CSYAGAST | Davide Robbiani et al., |
| | VGSYTLVSWYQQYPGKAPKLLIFEVTK | (Human) | (Human) | (Human) | (Human) | | PGHPGRSVG | | FV | 2020 |
| | RSSGISNRFSGSKSGNTASLTISGLQGE | | | | | | AFDI | | | (https://www.nature.co |
| | DEADYYCCSYAGASTFVFGGGTKLTVL | | | | | | | | | m/articles/s41586-020- |
| | | | | | | | | | | 2456-9) |
| C165 | EIVLTQSPGTLSLSPGERATLSCRASQS | IGHV1-69 | IGHJ3 | IGKV3-20 | IGKJ1 | 2287 | ARDLLDPQLD | 3489 | QQYGSSP | Davide Robbiani et al., |
| | VSSTYLAWYQQKPGQAPRLLIYGASSR | (Human) | (Human) | (Human) | (Human) | | DAFDI | | WT | 2020 |
| | ATGIPDRFSGSGSGTDFTLTISRLEPED | | | | | | | | | (https://www.biorxiv.or |
| | FAVYYCQQYGSSPWTFGQGTKVEIK | | | | | | | | | g/content/10.1101/202 |
| | | | | | | | | | | 0.05.13.092619v2) |
| C201 | IRMTQSPSSVSASVGDRVTITCRASQG | IGHV3-9 | IGHJ4 | IGKV1-12 | IGKJ4 | 2288 | VKGVEYSSSS | 3490 | QQANSFPL | Davide Robbiani et al., |
| | ISSWLAWYQQKPGKAPKLLIYVESSLQ | (Human) | (Human) | (Human) | (Human) | | NFDY | | T | 2020 |
| | SGVPSRFSGSGSGTDFTLTISSLQPEDF | | | | | | | | | (https://www.biorxiv.or |
| | ATYYCQQANSFPLTFGGGTKVEIK | | | | | | | | | g/content/10.1101/202 |
| | | | | | | | | | | 0.05.13.092619v2) |
| C202 | DIQLTQSPSSLSASVGDRVTITCQASQ | IGHV3-66 | IGHJ4 | IGKV1-33 | IGKJ2 | 2289 | ARDTLGRGG | 3491 | QQYDNLP | Davide Robbiani et al., |
| | DISNYLNWYQQKPGKAPKLLIYDASNL | (Human) | (Human) | (Human) | (Human) | | DY | | RS | 2020 |
| | ETGVPSRFSGSGSGTDFTFTISSLQPED | | | | | | | | | (https://www.biorxiv.or |
| | IATYYCQQYDNLPRSFGQGTKLEIK | | | | | | | | | g/content/10.1101/202 |
| | | | | | | | | | | 0.05.13.092619v2) |
| C204 | DIQLTQSPSSLSASVGDRVTITCRASQS | IGHV3-23 | IGHJ5 | IGKV1-39 | IGKJ1 | 2290 | ARESDCGSTS | 3492 | QQSYSTPP | Davide Robbiani et al., |
| | ISSYLNWYQQKPGKAPKLLIYAASSLQS | (Human) | (Human) | (Human) | (Human) | | CYQVGWFDP | | WT | 2020 |
| | GVPSRFSGSGSGTDFTLTISSLQPEDFA | | | | | | | | | (https://www.biorxiv.or |
| | TYYCQQSYSTPPWTFGQGTKVEIK | | | | | | | | | g/content/10.1101/202 |
| | | | | | | | | | | 0.05.13.092619v2) |
| C205 | EIVLTQSPGTLSLSPGERATLSCRASQS | IGHV1-46 | IGHJ4 | IGKV3-20 | IGKJ1 | 2291 | ARGPERGIVG | 3493 | QQYVSSP | Davide Robbiani et al., |
| | VSSSYLAWYQQKPGQAPRLLIYGASSR | (Human) | (Human) | (Human) | (Human) | | ATDYFDY | | WT | 2020 |
| | ATGIPDRFSGSGSGTDFTLTISRLEPED | | | | | | | | | (https://www.biorxiv.or |
| | FAVYYCQQYVSSPWTFGQGTKVEIK | | | | | | | | | g/content/10.1101/202 |
| | | | | | | | | | | 0.05.13.092619v2) |
| C207 | EIVLTQSPATLSLSPGERATLSCRASQS | IGHV3-23 | IGHJ4 | IGKV3-11 | IGKJ1 | 2292 | AKEPIGQPLL | 3494 | QQRSNWP | Davide Robbiani et al., |
| | VSSYLAWYQQKPGQAPRLLIYDASNR | (Human) | (Human) | (Human) | (Human) | | WWDY | | RG | 2020 |
| | ATGIPARFSGSGSGTDFTLTISSLEPEDF | | | | | | | | | (https://www.biorxiv.or |
| | AVYYCQQRSNWPRGFGQGTKVEIK | | | | | | | | | g/content/10.1101/202 |
| | | | | | | | | | | 0.05.13.092619v2) |
| C208 | EIVLTQSPGTLSLSPGERATLSCRASQS | IGHV5-51 | IGHJ5 | IGKV3-20 | IGKJ4 | 2293 | ARGPNLQNW | 3495 | QQYGSSLT | Davide Robbiani et al., |
| | VSGSYLAWYQQRPGQAPRLLIYGASS | (Human) | (Human) | (Human) | (Human) | | FDP | | | 2020 |
| | RATGIPDRFSGSGSGTDFTLTISRLEPE | | | | | | | | | (https://www.biorxiv.or |
| | DFAVYYCQQYGSSLTFGGGTKVEIK | | | | | | | | | g/content/10.1101/202 |
| | | | | | | | | | | 0.05.13.092619v2) |
| C210 | DIQLTQSPSFLSASVGDRVTITCRASQG | IGHV3-53 | IGHJ6 | IGKV1-9 | IGKJ4 | 2294 | ARDLMAYGM | 3496 | QQLNSYP | Davide Robbiani et al., |
| | ISSYLAWYQQKPGKAPKLLIYAASTLQS | (Human) | (Human) | (Human) | (Human) | | DV | | QGT | 2020 |
| | GVPSRFSGSGSGTEFTLTISSLQPEDFA | | | | | | | | | (https://www.biorxiv.or |
| | TYYCQQLNSYPQGTFGGGTKVEIK | | | | | | | | | g/content/10.1101/202 |
| | | | | | | | | | | 0.05.13.092619v2) |

| | | | | | Not | | | | | |
|---|---|---|---|---|---|---|---|---|---|---|
| | Ab | | | Neutral- | Neutral- | | | SEQ | | SEQ |
| | or | | Doesn't | ising | ising | Protein + | | ID | | ID |
| Name | Nb | Binds to | Bind to | Vs | Vs | Epitope | Origin | NO.: | VH or VHH | NO.: |
| C211 | Ab | SARS-CoV2 | SARS- | SARS-CoV2 | SARS-CoV1 | S; RBD | B-cells; SARS-CoV2 | 207 | EVQLVESGGGLVQPGGSLRLSCAASEFT | 1286 |
| | | | CoV1 | | | | Human Patient | | VSSNYMSWVRQAPGKGLEWVSVIYSG | |
| | | | | | | | | | GSTFYADSVKGRFTISRDNSKNTLYLQM | |
| | | | | | | | | | NSLRPEDTAVYYCARDYGDFYFDFWGQ | |
| | | | | | | | | | GTLVTVSS | |
| C212 | Ab | SARS-CoV2 | SARS- | | SARS-CoV1, | S; non- | B-cells; SARS-CoV2 | 208 | QVQLVQSGAEVKKPGASVKVSCKASGY | 1287 |
| | | | CoV1 | | SARS-CoV2 | RBD | Human Patient | | TVTGYYIHWVRQAPGQGLEWMGWISP | |
| | | | | | | | | | NSGGTNYAQKFQGWVTMTRDMSITTA | |
| | | | | | | | | | YMELSRLRSDDTAVYYCARERYFDLGG | |
| | | | | | | | | | MDVWGQGTTVTVSS | |
| C214 | Ab | SARS-CoV2 | SARS- | | SARS-CoV1, | S; RBD | B-cells; SARS-CoV2 | 209 | QVQLVESGGGVVQPGRSLRLSCAASGF | 1288 |
| | | | CoV1 | | SARS-CoV2 | | Human Patient | | TFSSYGMHWVRQAPGKGLEWVAAIWY | |
| | | | | | | | | | DGSNKHYADSVKGRFTISRDNSKNTLYL | |
| | | | | | | | | | QMNSLRAEDTAVYYCARDVGRVTTWF | |
| | | | | | | | | | DPWGQGTLVTVSS | |
| C215 | Ab | SARS-CoV1, | | | SARS-CoV2 | S; RBD | B-cells; SARS-CoV2 | 210 | EVQLLESGGGLVQPGGSLRLSCAASGFT | 1289 |
| | | SARS-CoV2 | | | | | Human Patient | | FSSYAMSWVRQAPGKGLEWVSAITDSG | |
| | | | | | | | | | DGTFYADSVKGRFTISRDNSKNTLYLQM | |
| | | | | | | | | | NSLRAEDTAVYYCASEEDYSNYVGWFD | |
| | | | | | | | | | PWGQGTLVTVSS | |
| C216 | Ab | SARS-CoV2 | SARS- | | SARS-CoV1, | S; RBD | B-cells; SARS-CoV2 | 211 | EVQLVESGGGLVQPGGSLRLSCAASGFT | 1290 |
| | | | CoV1 | | SARS-CoV2 | | Human Patient | | FSSYDMHWVRQATGKGLEWVSAIGTA | |
| | | | | | | | | | GDTYYPDSVKGRFTISRENAKNSLYLQM | |
| | | | | | | | | | NSLRAGDTAVYYCARDRGSSGWYGWY | |
| | | | | | | | | | FDLWGRGTLVTVSS | |
| CA1 | Ab | SARS-CoV2 | | SARS-CoV2 | | S; RBD | B-cells; SARS-CoV2 | 212 | EVQLVQSGAEVKKPGASVKVSCKASGYT | 1291 |
| | | | | | | | Human Patient | | FTSYGISWVRQAPGQGLEWMGWISAY | |
| | | | | | | | | | NGNTNYAQKLQGRVTMITTDTSTSTAY | |
| | | | | | | | | | MELRSLRSDDTAVYYCAREGYCSGGSCY | |
| | | | | | | | | | SGYYYYYGMDVWGQGTTVTVSS | |
| CB6 | Ab | SARS-CoV2 | | SARS-CoV2 | | S; RBD | B-cells; SARS-CoV2 | 213 | EVQLVESGGGLVQPGGSLRLSCAASGFT | 1292 |
| | | | | | | | Human Patient | | VSSNYMSWVRQAPGKGLEWVSVIYSG | |
| | | | | | | | | | GSTFYADSVKGRFTISRDNSMNTLFLQM | |
| | | | | | | | | | NSLRAEDTAVYYCARVLPMYGDYLDYW | |
| | | | | | | | | | GQGTLVTVSS | |
| CC12.1 | Ab | SARS-CoV2 | SARS- | SARS-CoV2 | SARS-CoV1 | S; RBD | B-cells; SARS-CoV2 | 214 | EVQLVESGGGLIQPGGSLRLSCAASGLT | 1293 |
| | | | CoV1 | | | | Human Patient | | VSSNYMSWVRQAPGKGLEWVSVIYSG | |
| | | | | | | | | | GSTFYADSVKGRFTISRDNSKNTLYLQM | |
| | | | | | | | | | NSLRAEDTAVYYCARDLDVYGLDVWGQ | |
| | | | | | | | | | GTTVTVSS | |
| CC12.10 | Ab | SARS-CoV2 | SARS- | SARS-CoV2 | SARS-CoV1 | S; RBD | B-cells; SARS-CoV2 | 215 | QVQLVQSGAEVKKPGASVKVSCKASGYI | 1294 |
| | | | CoV1 | | | | Human Patient | | YSGYFMHWVRQAPGQGLEWMGWISP | |
| | | | | | | | | | DSGGANYAQTFQGRVTMTRDTSTTTAH | |
| | | | | | | | | | MELSRLRSDDTAVYYCARGPRYSGTHFD | |
| | | | | | | | | | YWGQGTLVTVSS | |
| CC12.11 | Ab | SARS-CoV2 | SARS- | SARS-CoV2 | SARS-CoV1 | S; RBD | B-cells; SARS-CoV2 | 216 | QVQLVQSGAEVKKPGASVKVSCKASGYI | 1295 |
| | | | CoV1 | | | | Human Patient | | FSGYYTHWVRQAPGQGLEWMGWISP | |
| | | | | | | | | | DSGGTNYAQKFQGRVTMTRDTSITTAY | |
| | | | | | | | | | VELSGLRSDDTAVYYCARGPRYSGTYFD | |
| | | | | | | | | | YWGQGTLVTVSS | |
| CC12.12 | Ab | SARS-CoV2 | SARS- | SARS-CoV2 | SARS-CoV1 | S; RBD | B-cells; SARS-CoV2 | 217 | QVQLVQSGAEVKKPGASVKVSCKASGYI | 1296 |
| | | | CoV1 | | | | Human Patient | | YSGYYMHWVRQAPGQGLEWMGWISP | |
| | | | | | | | | | DSGGTNYAQRFQGRVTMTRDTSTTTAY | |
| | | | | | | | | | MELSRLRSDDTAVYYCARGPRYSGTYFD | |
| | | | | | | | | | YWGQGTLVTVSS | |

| | | | | | | SEQ | | SEQ | | |
|---|---|---|---|---|---|---|---|---|---|---|
| | | Heavy V | Heavy J | Light V | Light J | ID | | ID | | |
| Name | VL | Gene | Gene | Gene | Gene | NO.: | CDRH3 | NO.: | CDRL3 | Sources |
| C211 | EIVMTQSPATLSVSPGERATLSCRASQ | (Human) | IGHJ4 | IGKV3-15 | IGKJ1 | 2295 | ARDYGDFYFD | 3497 | QQYNNWP | Davide Robbiani et al., |
| | SVSSNLAWYQQKPGQGPRLLIYGAST | IGHV3-66 | (Human) | (Human) | (Human) | | F | | RT | 2020 |
| | RATGIPARFSGSGSGTEFTLTISSLQSE | | | | | | | | | (https://www.biorxiv.or |
| | DFAVYYCQQYNNWPRTFGQGTKVEIK | | | | | | | | | g/content/10.1101/202 |
| | | | | | | | | | | 0.05.13.092619v2) |
| C212 | LTQPASVSGSPGQSITISCTGTSSDVGS | IGHV1-2 | IGHJ6 | IGLV2-23 | IGLJ3 | 2296 | ARERYFDLGG | 3498 | CSYAGSST | Davide Robbiani et al., |
| | YNLVSWYQQHPGKAPKLMIYEDSKRP | (Human) | (Human) | (Human) | (Human) | | MDV | | RL | 2020 |
| | SGVSNRFSGSKSGNTASLTISGLQAED | | | | | | | | | (https://www.biorxiv.or |
| | EADYYCCSYAGSSTRLFGGGTKLTVL | | | | | | | | | g/content/10.1101/202 |
| | | | | | | | | | | 0.05.13.092619v2) |
| C214 | DIQLTQSPSSLSASVGDRVTITCRASQS | IGHV3-33 | IGHJ5 | IGKV1-39 | IGKJ1 | 2297 | ARDVGRVTT | 3499 | QQSYSTPP | Davide Robbiani et al., |
| | ISSYLTWYQQKPGKAPKLLIYAASSLQS | (Human) | (Human) | (Human) | (Human) | | WFDP | | WT | 2020 |
| | GVPSRFSGSGSGTDFTLTISSLQPEDFA | | | | | | | | | (https://www.biorxiv.or |
| | TYYCQQSYSTPPWTFGQGTKVEIK | | | | | | | | | g/content/10.1101/202 |
| | | | | | | | | | | 0.05.13.092619v2) |
| C215 | DIQLTQSPSSLSASVGDRVTITCRASQS | IGHV3-23 | IGHJ5 | IGKV1-39 | IGKJ1 | 2298 | ASEEDYSNYV | 3500 | QQSYSTPP | Davide Robbiani et al., |
| | ISSYLNWYQQKPGKAPKLLIYAASSLQS | (Human) | (Human) | (Human) | (Human) | | GWFDP | | WT | 2020 |
| | GVPSRFSGSGSGTDFTLTISSLQPEDFA | | | | | | | | | (https://www.biorxiv.or |
| | TYYCQQSYSTPPWTFGQGTKVEIK | | | | | | | | | g/content/10.1101/202 |
| | | | | | | | | | | 0.05.13.092619v2) |
| C216 | DIQLTQSPSSLSASVGDRVTITCRASQS | IGHV3-13 | IGHJ2 | IGKV1-39 | IGKJ5 | 2299 | ARDRGSSGW | 3501 | QQSYSTPPI | Davide Robbiani et al., |
| | ISSYLNWYQQKPGKAPKLLIYVASSLQS | (Human) | (Human) | (Human) | (Human) | | YGWYFDL | | T | 2020 |
| | GVPSRFSGSGSGTDFTLTISSLQPEDFA | | | | | | | | | (https://www.biorxiv.or |
| | TYYCQQSYSTPPITFGQGTRLEIK | | | | | | | | | g/content/10.1101/202 |
| | | | | | | | | | | 0.05.13.092619v2) |
| CA1 | DIVMTQTPATLSLSPGERATLSCRASQ | IGHV1-18 | IGHJ6 | IGKV3-11 | IGKJ3 | 2300 | AREGYCSGGS | 3502 | QQRRNW | Rui Shi et al., 2020 |
| | SVSSYLAWYQQKPGQAPRLLIYDASN | (Human) | (Human) | (Human) | (Human) | | CYSGYYYYYG | | GT | (https://www.nature.co |
| | RATGIPARFSGSGSGTDFTLTISSLEPE | | | | | | MDV | | | m/articles/s41586-020- |
| | DFAVYYCQQRRNWGTFGPGTKVDIK | | | | | | | | | 2381- |
| | | | | | | | | | | y_reference.pdf); NCBI |
| | | | | | | | | | | (https://www.ncbi.nlm. |
| | | | | | | | | | | nih.gov/nuccore/MT470 |
| | | | | | | | | | | 194); NCBI |
| | | | | | | | | | | (https://www.ncbi.nlm. |
| | | | | | | | | | | nih.gov/nuccore/MT470 |
| | | | | | | | | | | 1945) |
| CB6 | DIVMTQSPSSLSASVGDRVTITCRASQ | IGHV3-66 | IGHJ4 | IGKV1-39 | IGKJ2 | 2301 | ARVLPMYGD | 3503 | QQSYSTPP | Rui Shi et al., 2020 |
| | SISRYLNWYQQKPGKAPKLLIYAASSL | (Human) | (Human) | (Human) | (Human) | | YLDY | | EYT | (https://www.nature.co |
| | QSGVPSRFSGSGSGTDFTLTISSLQPED | | | | | | | | | m/articles/s41586-020- |
| | FATYYCQQSYSTPPEYTFGQGTKLEIK | | | | | | | | | 2381- |
| | | | | | | | | | | y_reference.pdf); NCBI |
| | | | | | | | | | | (https://www.ncbi.nlm. |
| | | | | | | | | | | nih.gov/nuccore/MT470 |
| | | | | | | | | | | 194); NCBI |
| | | | | | | | | | | (https://www.ncbi.nlm. |
| | | | | | | | | | | nih.gov/nuccore/MT470 |
| | | | | | | | | | | 1945) |
| CC12.1 | DIVMTQSPSFLSASVGDRVTITCRASQ | IGHV3-53 | IGHJ6 | IGKV1-9 | IGKJ3 | 2302 | ARDLDVYGLD | 3504 | QQLNSYPP | Thomas Rogers et al., |
| | GISSYLAWYQQKPGKAPKLLIYAASTL | (Human) | (Human) | (Human) | (Human) | | V | | KFT | 2020 |
| | QSGVPSRFSGSGSGTEFTLTISSLQPED | | | | | | | | | (https://science.science |
| | FATYYCQQLNSYPPKFTFGPGTKVEIK | | | | | | | | | mag.org/content/early/ |
| | | | | | | | | | | 2020/06/15/science.abc |
| | | | | | | | | | | 7520); Meng Yuan et al., |
| | | | | | | | | | | 2020 |
| | | | | | | | | | | (https://www.biorxiv.or |
| | | | | | | | | | | g/content/10.1101/202 |
| | | | | | | | | | | 0.06.08.141267v1) |
| CC12.10 | QSALTQPASVSGSPGQSLTISCTGTSSD | IGHV1-2 | IGHJ4 | IGLV2-14 | IGLJ3 | 2303 | ARGPRYSGTH | 3505 | SSYAGSST | Thomas Rogers et al., |
| | VGGYNYVSWYQQHPDKAPKLMIYDV | (Human) | (Human) | (Human) | (Human) | | FDY | | QV | 2020 |
| | NNRPSGVSNRFSGSKSGSTASLTISGL | | | | | | | | | (https://science.science |
| | QAEDEADYYCSSYAGSSTQVFGGGTK | | | | | | | | | mag.org/content/early/ |
| | LTVL | | | | | | | | | 2020/06/15/science.abc |
| | | | | | | | | | | 7520) |
| CC12.11 | QSVLTQPASVSGSPGQSITISCTGTSSD | IGHV1-2 | IGHJ4 | IGLV2-14 | IGLJ3 | 2304 | ARGPRYSGTY | 3506 | SSYTSSSAQ | 2020/06/15/science.abc |
| | VGGYNYVSWYQQHPGKVPKLMIYDV | (Human) | (Human) | (Human) | (Human) | | FDY | | L | Thomas Rogers et al., |
| | SNRPSGVSNRFSGSKSGNTASLTISGL | | | | | | | | | 2020 |
| | QAEDEADYYCSSYTSSSAQLFGGGTKL | | | | | | | | | (https://science.science |
| | TVL | | | | | | | | | mag.org/content/early/ |
| | | | | | | | | | | 7520) |
| CC12.12 | QSALTQPASVSGSPGQSITISCTGTSSD | IGHV1-2 | IGHJ4 | IGLV2-14 | IGLJ3 | 2305 | ARGPRYSGTY | 3507 | SSYTSGST | Thomas Rogers et al., |
| | VGGYNYVSWYQQHPDKAPKLMIYDV | (Human) | (Human) | (Human) | (Human) | | FDY | | QV | 2020 |
| | SNRPSGVSNRFSGSKSGNTASLTISGL | | | | | | | | | (https://science.science |
| | QAEDEADYYCSSYTSGSTQVFGGGTKL | | | | | | | | | mag.org/content/early/ |
| | TVL | | | | | | | | | 2020/06/15/science.abc |
| | | | | | | | | | | 7520) |

| | | | | | Not | | | | | |
|---|---|---|---|---|---|---|---|---|---|---|
| | Ab | | | Neutral- | Neutral- | | | SEQ | | SEQ |
| | or | | Doesn't | ising | ising | Protein + | | ID | | ID |
| Name | Nb | Binds to | Bind to | Vs | Vs | Epitope | Origin | NO.: | VH or VHH | NO.: |
| CC12.13 | Ab | SARS-CoV2 | SARS- | SARS-CoV2 | SARS-CoV1 | S; RBD | B-cells; SARS-CoV2 | 218 | EVQLVESGGGLIQPGGSLRLSCAASGFT | 1297 |
| | | | CoV1 | | | | Human Patient | | VSSNYMSWVRQAPGKGLEWVSVIYSG | |
| | | | | | | | | | GSTYYADSVKGRFTISRDNSKNTLYLQM | |
| | | | | | | | | | NSLRAEDTAVYYCARDPYGYSSIWDGQ | |
| | | | | | | | | | GGHWGQGTLVTVSS | |
| CC12.14 | Ab | SARS-CoV2 | SARS- | SARS-CoV2 | SARS-CoV1 | S; RBD | B-cells; SARS-Cov2 | 219 | QVQLVESGGGLVKPGGSLRLSCAASGFT | 1298 |
| | | | CoV1 | | | | Human Patient | | FNYYSMNWVRQAPGKGLEWISSISTSSS | |
| | | | | | | | | | FVYYADSVKGRFTISRDNAKTSLYLQMN | |
| | | | | | | | | | SLRAEDTAVYFCARGGYCSDGSCYVQDR | |
| | | | | | | | | | LIYYYSGLDVWGQGTTVTVSS | |
| CC12.15 | Ab | SARS-CoV2 | SARS- | SARS-CoV2 | SARS-CoV1 | S; RBD | B-cells; SARS-CoV2 | 220 | EVQLVESGGGLVQPGGSLRLSCAASGFT | 1299 |
| | | | CoV1 | | | | Human Patient | | FSTYEMNWVRQAPGKGLEWVSYISSSG | |
| | | | | | | | | | STIYYADSVKGRFTISRDNAKNSLYLQMS | |
| | | | | | | | | | SLRAEDTAIYYCARDRRRRYCTNGVCYR | |
| | | | | | | | | | PEEIDYWGQGTLVTVSS | |
| CC12.16 | Ab | SARS-CoV2 | SARS- | SARS-CoV2 | SARS-CoV1 | S; RBD | B-cells; SARS-CoV2 | 221 | QVQLVESGGGVVQPGRSLRLSCAASGF | 1300 |
| | | | CoV1 | (weak) | | | Human Patient | | TFSSYGMHWVRQAPGKGLEWVALIWY | |
| | | | | | | | | | DGSNKNYADSVKGRFTISRDNSKNTLDL | |
| | | | | | | | | | QMNSLRAEDTAVYYCARDPFPGAVAGT | |
| | | | | | | | | | GYLQYWGQGTLVTVSS | |
| CC12.17 | Ab | SARS-CoV2 | SARS- | SARS-CoV2 | SARS-CoV1 | S; RBD | B-cells; SARS-CoV2 | 222 | EVQLVESGGGVVQPGRSLRLSCAASGFT | 1301 |
| | | | CoV1 | (weak) | | | Human Patient | | FRNYGMHWVRQAPGKGLEGVAVISYD | |
| | | | | | | | | | GSNKYYADSVKGRFTISRDNSKNTLYLQ | |
| | | | | | | | | | MNSLRAEDTAVYYCAKSSGSYYYYYYGM | |
| | | | | | | | | | DVWGQGTTVTVSS | |
| CC12.18 | Ab | SARS-CoV1, | | SARS-CoV2 | SARS-CoV1 | S; RBD | B-cells; SARS-CoV2 | 223 | EVQLVQSGAEVKKPGASVKVSCKASGYT | 1302 |
| | | SARS-CoV2 | | (weak) | | | Human Patient | | FTSYYMHWVRQAPGQGLEWMGIINPS | |
| | | | | | | | | | GGSTSYAQKFQGRVTMTRDTSTSTVYM | |
| | | | | | | | | | ELSSLRSEDTAVYYCARLHCGGDCYLDY | |
| | | | | | | | | | WGQGTLVTVSS | |
| CC12.19 | Ab | SARS-CoV2 | SARS- | SARS-CoV2 | SARS-CoV1 | S; RBD | B-cells; SARS-CoV2 | 224 | EVQLLESGGGLVQPGGSLRLSCAASGFT | 1303 |
| | | | CoV1 | (weak) | | | Human Patient | | FSSYAMSWVRQAPGKGLEWVSAISGSG | |
| | | | | | | | | | GSTYYADSVKGRFTISRDNSKNTLYLQM | |
| | | | | | | | | | NSLRAEDTAVYYCAKGSGSGSYPNYYYY | |
| | | | | | | | | | YGMDVWGQGTTVTVSS | |
| CC12.2 | Ab | SARS-CoV2 | SARS- | SARS-CoV2 | SARS-CoV1 | S; RBD | B-cells; SARS-CoV2 | 225 | EVQLVESGGGLIQPGGSLRLSCAASGFT | 1304 |
| | | | CoV1 | | | | Human Patient | | VSSNYMSWVRQAPGKGLEWVSVFYSG | |
| | | | | | | | | | GSTYYADSVKGRFTISRDNSKNTLYLQM | |
| | | | | | | | | | NSLRAEDTAVYYCARDYGDLYFDYWGQ | |
| | | | | | | | | | GTLVTVSS | |
| CC12.20 | Ab | SARS-CoV2 | SARS- | | SARS-CoV1 | S; non- | B-cells; SARS-CoV2 | 226 | QVQLVESGGGVVQPGRSLRLSCAASGF | 1305 |
| | | | CoV1 | | | RBD | Human Patient | | TFSSYGMHWVRQAPGKGLEWVAVISY | |
| | | | | | | | | | DGSNKYYADSVKGRFTISRDNSKNTLYL | |
| | | | | | | | | | QMSSLRGEDTAVYYCAKDQAYYDILTGY | |
| | | | | | | | | | LNPPKNYYYYGMDVWGQGTTVTVSS | |
| CC12.21 | Ab | SARS-CoV2 | SARS- | | SARS-CoV1 | S; non- | B-cells; SARS-CoV2 | 227 | QVQLVQSGAEVKKPGASVKVSCKVSGY | 1306 |
| | | | CoV1 | | | RBD | Human Patient | | TLTELSMHWVRQAPGKGLEWMGGFD | |
| | | | | | | | | | PEDGETIYAQKFQGRVTMTEDTSTDTAY | |
| | | | | | | | | | MDLSSLRSEDTAVYYCATAFSIFGVVPPD | |
| | | | | | | | | | YWGQGTLVTVS | |
| CC12.23 | Ab | SARS-CoV2 | SARS- | SARS-CoV2 | SARS-CoV1 | S; non- | B-cells; SARS-CoV2 | 228 | QVQLQESGPGLVKPSETLSLTCTVSGGSI | 1307 |
| | | | CoV1 | (weak) | | RBD | Human Patient | | SSSSYYWGWIRQPPGKGLEWIGSIYYSG | |
| | | | | | | | | | STYYNPSLKSRVTISVDTSKNQFSLKLSSV | |
| | | | | | | | | | TAADTAVYYCARQGDCSTTSCAYDYWG | |
| | | | | | | | | | QGTLVTVSS | |
| CC12.24 | Ab | SARS-CoV2 | SARS- | | SARS-CoV1 | S; Unk | B-cells; SARS-CoV2 | 229 | EVQLVESGGGVVQPGRSLRLSCSASGFT | 1308 |
| | | | CoV1 | | | | Human Patient | | FSIYGMHWVRQAPGKGLEWVAVISYD | |
| | | | | | | | | | GSNKYYADSVKGRFTISRDNSKNTLYLQ | |
| | | | | | | | | | MNSLRAEDTAVYYCAKDRTGNYYYGM | |
| | | | | | | | | | DVWGQGTTVTVSS | |

| | | | | | | SEQ | | SEQ | | |
|---|---|---|---|---|---|---|---|---|---|---|
| | | Heavy V | Heavy J | Light V | Light J | ID | | ID | | |
| Name | VL | Gene | Gene | Gene | Gene | NO.: | CDRH3 | NO.: | CDRL3 | Sources |
| CC12.13 | DVVMTQSPSSLSASVGDRVTITCQAS | IGHV3-53 | IGHJ4 | IGKV1-33 | IGKJ5 | 2306 | ARDPYGYSSI | 3508 | QQYDNLPI | 2020/06/15/science.abc |
| | QDISNYLNWYQQKPGKAPKLLIYDAS | (Human) | (Human) | (Human) | (Human) | | WDGQGGH | | T | Thomas Rogers et al., |
| | NFATGVPSRFSGTGSGTDFTFTISSLQP | | | | | | | | | 2020 |
| | EDIATYYCQQYDNLPITFGQGTRLEIK | | | | | | | | | (https://science.science |
| | | | | | | | | | | mag.org/content/early/ |
| | | | | | | | | | | 7520) |
| CC12.14 | DVVMTQSPLSLPVTLGQPASISCRSSQ | IGHV3-21 | IGHJ6 | IGKV2-30 | IGKJ3 | 2307 | ARGGYCSDGS | 3509 | MQGTHW | Thomas Rogers et al., |
| | SLVYSDGNTYLNWFQQRPGQSPRRLI | (Human) | (Human) | (Human) | (Human) | | CYVQDRLIYYY | | PPT | 2020 |
| | YKVSNRDSGVPDRFSGSGSGTDFTLKI | | | | | | SGLDV | | | (https://science.science |
| | SRVEAEDVGVFYCMQGTHWPPTFGQ | | | | | | | | | mag.org/content/early/ |
| | GTKVDIK | | | | | | | | | 2020/06/15/science.abc |
| | | | | | | | | | | 7520) |
| CC12.15 | QAVLTQPPSVSGAPGQRVTISCTGSSS | IGHV3-48 | IGHJ4 | IGLV1-40 | IGLJ3 | 2308 | ARDRRRRYCT | 3510 | QSYDSSLS | Thomas Rogers et al., |
| | NIEAGYDVHWYQQLPGTAPKLLIYVN | (Human) | (Human) | (Human) | (Human) | | NGVCYRPEEI | | GVV | 2020 |
| | SNRPSGVPDRFSGSKSGTSASLAITGL | | | | | | DY | | | (https://science.science |
| | QAEDEADYYCQSYDSSLSGVVFGGGT | | | | | | | | | mag.org/content/early/ |
| | KLIVL | | | | | | | | | 2020/06/15/science.abc |
| | | | | | | | | | | 7520) |
| CC12.16 | SYELTQPPSVSVAPGQTARITCGGNNI | IGHV3-33 | IGHJ4 | IGLV3-21 | IGLJ3 | 2309 | ARDPFPGAV | 3511 | QVWDSSS | Thomas Rogers et al., |
| | GSKSVHWYQQKPGQAPVLVVYDDSD | (Human) | (Human) | (Human) | (Human) | | AGTGYLQY | | DPWV | 2020 |
| | RPSGIPERFSGSNSGNTATLTISRVEAG | | | | | | | | | (https://science.science |
| | DEADYYCQVWDSSSDPWVFGGGTKL | | | | | | | | | mag.org/content/early/ |
| | TVL | | | | | | | | | 2020/06/15/science.abc |
| | | | | | | | | | | 7520) |
| CC12.17 | SYELTQPPSVSVAPGKTARITCGGNNI | IGHV3-30 | IGHJ6 | IGLV3-21 | IGLJ3 | 2310 | AKSSGSYYYYY | 3512 | QVWDSSS | Thomas Rogers et al., |
| | GSKSVHWYQQKPGQAPVLVVYDDTD | (Human) | (Human) | (Human) | (Human) | | YGMDV | | DHPVV | 2020 |
| | RPSGIPERFSGSSSGNTATLTISRVEAG | | | | | | | | | (https://science.science |
| | DEADYYCQVWDSSSDHPVVFGGGTK | | | | | | | | | mag.org/content/early/ |
| | LTVL | | | | | | | | | 2020/06/15/science.abc |
| | | | | | | | | | | 7520) |
| CC12.18 | NFMLTQPHSVSESPGKTVTISCTRSSG | IGHV1-46 | IGHJ4 | IGLV6-57 | IGLJ3 | 2311 | ARLHCGGDC | 3513 | QSYDSSNH | Thomas Rogers et al., |
| | SIANNYVKWYQQRPGSSPTTVIYEDN | (Human) | (Human) | (Human) | (Human) | | YLDY | | EEIWVV | 2020 |
| | QRPSGVPDRFSGSIDSSSNSASLTISGL | | | | | | | | | (https://science.science |
| | KTEDEADYYCQSYDSSNHEEIWVVFGG | | | | | | | | | mag.org/content/early/ |
| | GTKLIVL | | | | | | | | | 2020/06/15/science.abc |
| | | | | | | | | | | 7520) |
| CC12.19 | SYELTQSPSVSVAPGQTARITCGGNNI | IGHV3-23 | IGHJ6 | IGLV3-21 | IGLJ3 | 2312 | AKGSGSGSYP | 3514 | QVWDNNS | 2020/06/15/science.abc |
| | GSKSVHWYQRKPGQAPVLVVYDDSD | (Human) | (Human) | (Human) | (Human) | | NYYYYYGMD | | DHLV | Thomas Rogers et al., |
| | RPSGIPERFSGSNSGNTATLTISRVEAG | | | | | | V | | | 2020 |
| | DEADYYCQVWDNNSDHLVFGGGTKL | | | | | | | | | (https://science.science |
| | TVL | | | | | | | | | mag.org/content/early/ |
| | | | | | | | | | | 7520) |
| CC12.2 | EIVMTQSPGTLSLSPGERATLSCRASQ | IGHV3-53 | IGHJ4 | IGKV3-20 | IGKJ2 | 2313 | ARDYGDLYFD | 3515 | QQYGSSPR | Thomas Rogers et al., |
| | SVSSSYLAWYQQKPGQAPRLLIYGVSS | (Human) | (Human) | (Human) | (Human) | | Y | | | 2020 |
| | RATGIPDRFSGSGSETDFTLTISRLEPEE | | | | | | | | | (https://science.science |
| | FAVYYCQQYGSSPRTFGQGTKLEIK | | | | | | | | | mag.org/content/early/ |
| | | | | | | | | | | 2020/06/15/science.abc |
| | | | | | | | | | | 7520) |
| CC12.20 | QSVLTQPPSASSTPGQRVTISCSGSSSN | IGHV3-30 | IGHJ6 | IGLV1-47 | IGLJ3 | 2314 | AKDQAYYDIL | 3516 | AAWDDSL | Thomas Rogers et al., |
| | IGSNYVYWYQQLPGTAPKLLIYTNNQR | (Human) | (Human) | (Human) | (Human) | | TGYLNPPKNY | | SGRVV | 2020 |
| | PSGVPDRFSGSKSGTSASLAISGLRSED | | | | | | YYYGMDV | | | (https://science.science |
| | EADYYCAAWDDSLSGRVVFGGGTKLT | | | | | | | | | mag.org/content/early/ |
| | VL | | | | | | | | | 2020/06/15/science.abc |
| | | | | | | | | | | 7520) |
| CC12.21 | QAVVTQPPSASGTPGQRVTISCSGSSS | IGHV1-24 | IGHJ4 | IGLV1-44 | IGLJ3 | 2315 | ATAFSIFGVVP | 3517 | AAWDDSL | Thomas Rogers et al., |
| | NIGSNTVNWYQQLPGTAPKLLIYSNN | (Human) | (Human) | (Human) | (Human) | | PDY | | NGPV | 2020 |
| | QRPSGVPDRFSGSKSGTSASLAISGLQ | | | | | | | | | (https://science.science |
| | SEDEADYYCAAWDDSLNGPVFGGGT | | | | | | | | | mag.org/content/early/ |
| | KLTVL | | | | | | | | | 2020/06/15/science.abc |
| | | | | | | | | | | 7520) |
| CC12.23 | SYELTQPPSVSVSPGQTARITCSGDALP | IGHV4-39 | IGHJ4 | IGLV3-25 | IGLJ3 | 2316 | ARQGDCSTTS | 3518 | QSADSSGT | Thomas Rogers et al., |
| | KQYAYWYQQKPGQAPVLVIYKDSERP | (Human) | (Human) | (Human) | (Human) | | CAYDY | | YLVV | 202 |
| | SGIPERFSGSSSGTTATLTISGVQAEDE | | | | | | | | | (https://science.science |
| | ADYYCQSADSSGTYLVVFGGGTKLAV | | | | | | | | | mag.org/content/early/ |
| | | | | | | | | | | 2020/06/15/science.abc |
| | | | | | | | | | | 7520) |
| CC12.24 | DIQLTQSPSSLSASVGDRVTITCRASQS | IGHV3-30 | IGHJ6 | IGKV1-39 | IGKJ1 | 2317 | AKDRTGNYYY | 3519 | QQSYSTP | Thomas Rogers et al., |
| | ISSYLNWYQQKPGKAPKLLIYAASNLQ | (Human) | (Human) | (Human) | (Human) | | GMDV | | WT | 2020 |
| | SGVPSRFSGSGSGTDFTLTISSLQPEDF | | | | | | | | | (https://science.science |
| | ATYYCQQSYSTPWTFGQGTKVEIK | | | | | | | | | mag.org/content/early/ |
| | | | | | | | | | | 2020/06/15/science.abc |
| | | | | | | | | | | 7520) |

| | | | | | Not | | | | | |
|---|---|---|---|---|---|---|---|---|---|---|
| | Ab | | | Neutral- | Neutral- | | | SEQ | | SEQ |
| | or | | Doesn't | ising | ising | Protein + | | ID | | ID |
| Name | Nb | Binds to | Bind to | Vs | Vs | Epitope | Origin | NO.: | VH or VHH | NO.: |
| CC12.25 | Ab | SARS-CoV1, | | | SARS-CoV1 | S; non- | B-cells; SARS-CoV2 | 230 | QVQLVESGGGLVQPGGSLRLSCAASGF | 1309 |
| | | SARS-CoV2 | | | | RBD | Human Patient | | TFSSYAMSWVRQAPGKGLEWVSAISGS | |
| | | | | | | | | | GDSTYYADSVKGRFTISRDNSKNTLYLQ | |
| | | | | | | | | | MNSLRAEDTAVYYCAKDRYYEFWSGYS | |
| | | | | | | | | | NWFDPWGQGTLVTISS | |
| CC12.26 | Ab | SARS-CoV2 | SARS- | | SARS-CoV1 | S; non- | B-cells; SARS-CoV2 | 231 | EVQLVQSGAEVKKPGESLKISCKGSGYSF | 1310 |
| | | | CoV1 | | | RBC | Human Patient | | TSYWIGWVRQMPGKGLEWMGIIYPGD | |
| | | | | | | | | | SDTRYSPSFQGQVTVSADKSISTAYLQW | |
| | | | | | | | | | SSLKASDTAMYYCARVNYYDSSGYPSFH | |
| | | | | | | | | | FDYWGQGTLVTVS | |
| CC12.27 | Ab | SARS-CoV1, | | | SARS-CoV1 | S; non- | B-cells; SARS-CoV2 | 232 | QVQLVQSGAEVKKPGASVKVSCKASGY | 1311 |
| | | SARS-CoV2 | | | | RBD | Human Patient | | TFIGYYMHWVRQAPGQGLEWMGWIN | |
| | | | | | | | | | PNSGGTNYAQKFQGRVTMTRDTSISTV | |
| | | | | | | | | | YMELSRLRSDDTAVYYCAREMPAAMGY | |
| | | | | | | | | | YYYGMDVWGQGTTVTVSS | |
| CC12.28 | Ab | SARS-CoV1, | | SARS-CoV2 | | S; RBD | B-cells; SARS-CoV2 | 233 | EVQLLESGGGLVQPGGSLRLSCAASGFT | 1312 |
| | | SARS-CoV2 | | and SARS- | | | Human Patient | | FSNYAMTWVRQAPGKGLEWVSAISSGS | |
| | | | | CoV1 | | | | | GSTYYADSVKGRFTISRDNSKNTVYLQM | |
| | | | | | | | | | NSLRAEDTAIYYCAKANKYSSSEFDFWG | |
| | | | | | | | | | QGTLVTISS | |
| CC12.3 | Ab | SARS-CoV2 | SARS- | SARS-CoV2 | SARS-CoV1 | S; RBD | B-cells; SARS-CoV2 | 234 | QVQLVESGGGLIQPGGSLRLSCAASGFT | 1313 |
| | | | CoV1 | | | | Human Patient | | VSSNYMSWVRQAPGKGLEWVSVIYSG | |
| | | | | | | | | | GSTFYADSVKGRFTISRDNSKSTLYLQM | |
| | | | | | | | | | NSLRVEDTAVYYCARDFGDFYFDYWGQ | |
| | | | | | | | | | GTLVTVSS | |
| CC12.4 | Ab | SARS-CoV2 | SARS- | SARS-CoV2 | SARS-CoV1 | S; RBD | B-cells; SARS-CoV2 | 235 | QVQLVQSGAEVKKPGASVKVSCKASGY | 1314 |
| | | | CoV1 | | | | Human Patient | | TFTGYYMHWVRQAPGQGLEWMGWIS | |
| | | | | | | | | | PNSGGTNYAQKFQGWVTMTRDTSVST | |
| | | | | | | | | | AYMELSRLRFDDTAVYYCATESWVYGS | |
| | | | | | | | | | GSYSSGAFDIWGQGTMVTVSS | |
| CC12.5 | Ab | SARS-CoV2 | SARS- | SARS-CoV2 | SARS-CoV1 | S; RBD | B-cells; SARS-CoV2 | 236 | EVQLVQSGAEVKKPGASVKVSCKASGYI | 1315 |
| | | | CoV1 | | | | Human Patient | | YSGYYMHWVRQAPGQGLEWMGWISP | |
| | | | | | | | | | DSGGTNYAQRFQGRVTMTRDTSTTTAY | |
| | | | | | | | | | MELSRLRSDDTAMYYCARGPRYSGTYF | |
| | | | | | | | | | DYWGQGTLVTVSS | |
| CC12.6 | Ab | SARS-CoV2 | SARS- | SARS-CoV2 | SARS-CoV1 | S; RBD | B-cells; SARS-CoV2 | 237 | QVQLVQSGAEVKKPGASVKVSCKASGYI | 1316 |
| | | | CoV1 | | | | Human Patient | | FSGYYMHWVRQAPGQGLEWMGWISP | |
| | | | | | | | | | DSGGTNYAQKFQGRVTMTRDTSITTGY | |
| | | | | | | | | | MELSGLRSDDTAVYYCARGPRYSGTYFD | |
| | | | | | | | | | YWGQGTLVTVSS | |
| CC12.7 | Ab | SARS-CoV2 | SARS- | SARS-CoV2 | SARS-CoV1 | S; RBD | B-cells; SARS-CoV2 | 238 | EVQLVQSGAEVKKPGASVKVTCKTSGYI | 1317 |
| | | | CoV1 | | | | Human Patient | | FSGYYMHWVRQVPGQGLEWMGWISP | |
| | | | | | | | | | DSGATNYAQKFQGRVTMTRDTSITTSYV | |
| | | | | | | | | | ELTWLKSDDTAVYYCARGPRYSGTYFDF | |
| | | | | | | | | | WGQGTLVTVSS | |
| CC12.8 | Ab | SARS-CoV2 | SARS- | SARS-CoV2 | SARS-CoV1 | S; RBD | B-cells; SARS-CoV2 | 239 | QVQLVQSGAEVKKPGASVKVSCKASGYI | 1318 |
| | | | CoV1 | | | | Human Patient | | FSGYYTHWVRQAPGQGLEWMGWISP | |
| | | | | | | | | | DSGGTNYAQKFQGRVTMTRDTSITTAY | |
| | | | | | | | | | VELSGLRSDDTAVYYCARGPRYSGTYFD | |
| | | | | | | | | | YWGQGTLVTVSS | |
| CC12.9 | Ab | SARS-CoV2 | SARS- | SARS-CoV2 | SARS-CoV1 | S; non- | B-cells; SARS-CoV2 | 240 | EVQLVQSGAEVKKPGASVKVSCKASGYI | 1319 |
| | | (weak) | CoV1 | | | RBD | Human Patient | | FSGYYMHWVRQAPGQGLEWMGWISP | |
| | | | | | | | | | DSGGTNYAQNFQGRVTMTRDTSISTGY | |
| | | | | | | | | | MELSRLRSDDTAMYYCARGPRYSGTYF | |
| | | | | | | | | | DYWGQGVLVTVSS | |
| CC6.29 | Ab | SARS-CoV2 | | SARS-CoV2 | | S; RBD | B-cells; SARS-CoV2 | 241 | QVQLVQSGSELKKPGASVKVSCKASGYT | 1320 |
| | | | | | | | Human Patient | | FATYALNWVRQAPGQGLEWMGWVNT | |
| | | | | | | | | | NTGSPTYAQGFTGRFVFSFDTSVSTAYL | |
| | | | | | | | | | QIRTLKAEDTAVYYCAVYYYDSGSPGWF | |
| | | | | | | | | | DPWGQGTLVTVSS | |

| | | | | | | SEQ | | SEQ | | |
|---|---|---|---|---|---|---|---|---|---|---|
| | | Heavy V | Heavy J | Light V | Light J | ID | | ID | | |
| Name | VL | Gene | Gene | Gene | Gene | NO.: | CDRH3 | NO.: | CDRL3 | Sources |
| CC12.25 | QSALTQPPSASGTPGQRVTISCSGSSS | IGHV3-23 | IGHJ5 | IGLV1-44 | IGLJ3 | 2318 | AKDRYYEFWS | 3520 | AAWDDSL | Thomas Rogers et al., |
| | NIGSNTVNWYQQLPGTAPKVLVYSND | (Human) | (Human) | (Human) | (Human) | | GYSNWFDP | | NGPV | 2020 |
| | QRPSGVPDRFSGSKSGTSASLAISGLQ | | | | | | | | | (https://science.science |
| | SEDEADYYCAAWDDSLNGPVFGGGT | | | | | | | | | mag.org/content/early/ |
| | KLTVL | | | | | | | | | 2020/06/15/science.abc |
| | | | | | | | | | | 7520) |
| CC12.26 | QTVVTQEPSLTVSPGGTVTLTCVSSTG | IGHV5-51 | IGHJ4 | IGLV7-43 | IGLJ3 | 2319 | ARVNYYDSSG | 3521 | LLYYGGAQ | Thomas Rogers et al., |
| | AVTSGYYPNWFQQKPGQAPRALIYST | (Human) | (Human) | (Human) | (Human) | | YPSFHFDY | | RWV | 2020 |
| | SKKHSWTPARFSGSLLGGKAALTLSGV | | | | | | | | | (https://science.science |
| | QPEDEAEYYCLLYYGGAQRWVFGGG | | | | | | | | | mag.org/content/early/ |
| | TKLTVL | | | | | | | | | 2020/06/15/science.abc |
| | | | | | | | | | | 7520) |
| CC12.27 | QSVLTQPASVSGSPGQSITISCTGTSSD | IGHV1-2 | IGHJ6 | IGLV3-23 | IGLJ1 | 2320 | AREMPAAM | 3522 | YSYAGSSTF | Thomas Rogers et al., |
| | VGSYNLVSWYQQHPGKAPKLMIYEGS | (Human) | (Human) | (Human) | (Human) | | GYYYYGMDV | | V | 2020 |
| | KRPSGVSNRFSGSKSGNTASLTISGLQ | | | | | | | | | (https://science.science |
| | AEDEADYYCYSYAGSSTFVFVFGTGTK | | | | | | | | | mag.org/content/early/ |
| | VIVL | | | | | | | | | 2020/06/15/science.abc |
| | | | | | | | | | | 7520) |
| CC12.28 | QSALTQPPSASGTPGQRVTISCSGSSS | IGHV3-23 | IGHJ4 | IGLV1-47 | IGLJ3 | 2321 | AKANKYSSSE | 3523 | AAWDDSL | Thomas Rogers et al., |
| | NIGSNYVYWYQQLPGAAPKLLIYRND | (Human) | (Human) | (Human) | (Human) | | FDF | | SGWV | 2020 |
| | QRPSGVPDRFSGSKSGTSVSLAISGLRS | | | | | | | | | (https://science.science |
| | EDEADYYCAAWDDSLSGWVFGGGTK | | | | | | | | | mag.org/content/early/ |
| | LTVL | | | | | | | | | 2020/06/15/science.abc |
| | | | | | | | | | | 7520) |
| CC12.3 | EIVLTQSPGTLSLSPGERATLSCRASQS | IGHV3-53 | IGHJ4 | IGKV3-20 | IGKJ2 | 2322 | ARDFGDFYFD | 3524 | QQYGSSPR | Thomas Rogers et al., |
| | VSSYLAWYQQKPGQAPRLLIYGASSRA | (Human) | (Human) | (Human) | (Human) | | Y | | T | 2020 |
| | TGIPDRFSGSGSGTDFTLTISRLEPEDF | | | | | | | | | (https://science.science |
| | AVYYCQQYGSSPRTFGQGTKLEIK | | | | | | | | | mag.org/content/early/ |
| | | | | | | | | | | 2020/06/15/science.abc |
| | | | | | | | | | | 7520); Meng Yuan et al., |
| | | | | | | | | | | 2020 |
| | | | | | | | | | | (https://www.biorxiv.or |
| | | | | | | | | | | g/content/10.1101/202 |
| | | | | | | | | | | 0.06.08.141267v1) |
| CC12.4 | QSVLTQPPSASGSPGQSVTISCTGTSS | IGHV1-2 | IGHJ3 | IGLV2-8 | IGLJ3 | 2323 | ATESWVYGS | 3525 | TSYAGSNN | Thomas Rogers et al., |
| | DVGGYDYVSWYQQHPGKAPKLMIYE | (Human) | (Human) | (Human) | (Human) | | GSYSSGAFDI | | FV | 2020 |
| | VSKRPSGVPDRFSGSKSGNTASLTVPG | | | | | | | | | (https://science.science |
| | LQAEDEADYYCTSYAGSNNFVFGGGT | | | | | | | | | mag.org/content/early/ |
| | KLIVL | | | | | | | | | 2020/06/15/science.abc |
| | | | | | | | | | | 7520) |
| CC12.5 | QTVVTQPASVSGSPGQSITISCTGTSSD | IGHV1-2 | IGHJ4 | IGLV2-14 | IGLJ3 | 2324 | ARGPRYSGTY | 3526 | SSYTSSSTQ | Thomas Rogers et al., |
| | VGGYNYVSWYQQHPDKAPKLIIYDVS | (Human) | (Human) | (Human) | (Human) | | FDY | | V | 2020 |
| | NRPSGVSNRFSGSKSGNTASLTISGLQ | | | | | | | | | (https://science.science |
| | AEDEAAYYCSSYTSSSTQVFGGGTKLT | | | | | | | | | mag.org/content/early/ |
| | VL | | | | | | | | | 2020/06/15/science.abc |
| | | | | | | | | | | 7520) |
| CC12.6 | QSALTQPTSVSGSPGQSITISCTGTSSD | IGHV1-2 | IGHJ4 | IGLV2-14 | IGLJ3 | 2325 | ARGPRYSGTY | 3527 | SSYTSSSTQ | Thomas Rogers et al., |
| | VGGYNYVSWYQQHPGKAPKLIIYDVS | (Human) | (Human) | (Human) | (Human) | | FDY | | V | 2020 |
| | NRPSGVSNRFSGSKSGNTASLTISGLQ | | | | | | | | | (https://science.science |
| | AEDEADYYCSSYTVSSTQVFGGGTKLT | | | | | | | | | mag.org/content/early/ |
| | VL | | | | | | | | | 2020/06/15/science.abc |
| | | | | | | | | | | 7520) |
| CC12.7 | QPVLTQPASVSGSPGQSLTISCTGTSS | IGHV1-2 | IGHJ4 | IGLV2-14 | IGLJ3 | 2326 | ARGPRYSGTY | 3528 | SSYTVSSTQ | Thomas Rogers et al. |
| | DIGGFNYVSWYQQHPGKAPKLMIFD | (Human) | (Human) | (Human) | (Human) | | FDY | | V | 2020 |
| | VSKRPSGVPNRFSGSKSGNTASLTISGL | | | | | | | | | (https://science.science |
| | QAEDEGDYYCSSYTISSAQVFGGGTKL | | | | | | | | | mag.org/content/early/ |
| | TVL | | | | | | | | | 2020/06/15/science.abc |
| | | | | | | | | | | 7520) |
| CC12.8 | QSALTQPASVSGSPGQSITISCTGTSSD | IGHV1-2 | IGHJ4 | IGLV2-14 | IGLJ3 | 2327 | ARGPRYSGTY | 3529 | SSYTSSSAQ | Thomas Rogers et al., |
| | VGGYNHVSWYQQHPGKAPKLMIYDV | (Human) | (Human) | (Human) | (Human) | | FDY | | L | 2020 |
| | SNRPSGVSNRFSGSKSGNTASLTISGL | | | | | | | | | (https://science.science |
| | QAEDEADYYCSSYTSSSAQLFGGGTKL | | | | | | | | | mag.org/content/early/ |
| | TVL | | | | | | | | | 2020/06/15/science.abc |
| | | | | | | | | | | 7520) |
| CC12.9 | QSVLTQPASVSGSPGQSITISCTGTSSD | IGHV1-2 | IGHJ4 | IGLV2-14 | IGLJ3 | 2328 | ARGPRYSGTY | 3530 | SSYTSSSAQ | Thomas Rogers et al., |
| | VGGYNYVSWYQQHPGKVPKLMIYDV | (Human) | (Human) | (Human) | (Human) | | FDY | | V | 2020 |
| | SNRPSGVSNRFSGSKSGNTASLTISGL | | | | | | | | | (https://science.science |
| | QAEDEADYYCSSYTSSSAQVFGGGTKL | | | | | | | | | mag.org/content/early/ |
| | TVL | | | | | | | | | 2020/06/15/science.abc |
| | | | | | | | | | | 7520) |
| CC6.29 | DIQLTQSPSSLSASVGDRVTITCRASQT | IGHV7-4- | IGHJ5 | IGKV1-39 | IGKJ3 | 2329 | AVYYYDSGSP | 3531 | QQSYSTPP | Thomas Rogers et al., |
| | ASSYLNWYQQKPGKAPNLLIYAASSLQ | 1 | (Human) | (Human) | (Human) | | GWFDP | | T | 2020 |
| | SGVPSRFSGSGSVTDFTLTISSLQPEDF | (Human) | | | | | | | | (https://science.science |
| | ATYYCQQSYSTPPTFGQGTKVDIK | | | | | | | | | mag.org/content/early/ |
| | | | | | | | | | | 2020/06/15/science.abc |
| | | | | | | | | | | 7520) |

| | | | | | Not | | | | | |
|---|---|---|---|---|---|---|---|---|---|---|
| | Ab | | | Neutral- | Neutral- | | | SEQ | | SEQ |
| | or | | Doesn't | ising | ising | Protein + | | ID | | ID |
| Name | Nb | Binds to | Bind to | Vs | Vs | Epitope | Origin | NO.: | VH or VHH | NO.: |
| CC6.30 | Ab | SARS-CoV2 | | SARS-CoV2 | | S; RBD | B-cells; SARS-CoV2 | 242 | QVQLVQSGAEVKKPGSSVKVSCKASGG | 1321 |
| | | | | | | | Human Patient | | TFSIYAITWVRQAPGQGLEWMGGIIPII | |
| | | | | | | | | | GTANYAQKFQGRVTITADKSTSTAYMEL | |
| | | | | | | | | | SSLRSEDTAVYYCARDFRYCSSTRCYFWF | |
| | | | | | | | | | DPWGQGTLVTVSS | |
| CC6.31 | Ab | SARS-CoV2 | | SARS-CoV2 | | S; RBD | B-cells; SARS-CoV2 | 243 | EVQLVQSGAEVKKPGASVKVSCMASGY | 1322 |
| | | | | | | | Human Patient | | TFTSYYMHWVRQAPGQGLEWMGIISP | |
| | | | | | | | | | SGGGTSYAQKFQGRVTLTRDTSTSTVYM | |
| | | | | | | | | | ELSSLRSEDTAVYYCARWYDSTGSIDYW | |
| | | | | | | | | | GQGTLVTVSS | |
| CC6.32 | Ab | SARS-CoV1, | | SARS-CoV2 | | S; RBD | B-cells; SARS-CoV2 | 244 | EVQLVESGGGLVQPGRSLRLSCAASGFT | 1323 |
| | | SARS-CoV2 | | | | | Human Patient | | FDDYAMHWVRQAPGKGLEWVSGISW | |
| | | | | | | | | | NSGSIAFAGSVKGRFTISRDNAKNSLYLQ | |
| | | | | | | | | | MNSLRAEDTALYYCAKDQGYSYGNYFD | |
| | | | | | | | | | YWGQGTLVTVSS | |
| CC6.33 | Ab | SARS-CoV1, | | SARS-CoV2 | | S; RBD | B-cells; SARS-CoV2 | 245 | QVQLVQSGAEVKKPGSSVKVSCKASGG | 1324 |
| | | SARS-CoV2 | | and SARS- | | | Human Patient | | TFSSSAISWVRQAPGQGLEWMGGIIPIL | |
| | | | | CoV1 | | | | | DITNYAQKFQGRVTITADKSTSTAFMELS | |
| | | | | | | | | | SLRSEDTAVYYCALRNQWDLLVYWGQG | |
| | | | | | | | | | TLVTVSS | |
| Clone11- | Ab | SARS-CoV2 | | | | S; RBD | Immunised Mouse | 246 | QVQLQQPGAELVMPGASVKMSCKASG | 1325 |
| 9 | | | | | | | | | YTFTDYWMHWVKQRPGQGLEWIGAE | |
| | | | | | | | | | DTSDSYTSYNQKFKGKATLTVDESSSTAY | |
| | | | | | | | | | MQLSSLTSEDSAVYYCARRGYGSSYTWF | |
| | | | | | | | | | AYWGQGTLVTVSA | |
| CnC2t1p1_ | Ab | SARS-CoV2 | | | SARS-CoV2 | S; Unk | B-cells; SARS-CoV2 | 247 | QVQLVQSGAEVKKPGSSVKVSCKASGG | 1326 |
| B10 | | | | | | | Human Patient | | TFSSYAISWVRQAPGQGLEWMGGIIPIF | |
| | | | | | | | | | GTANYAQKFQGRVTITADKSTSTAYMEL | |
| | | | | | | | | | SSLRSEDTAVYYCARVSGYDSSGYWGDY | |
| | | | | | | | | | WGQGTLVTVSS | |
| CnC2t1p1_ | Ab | SARS-CoV2 | | SARS-CoV2 | | S; RBD | B-cells; SARS-CoV2 | 248 | QVQLVQSGAEVKKPGASVKVSCKASGY | 1327 |
| B4 | | | | | | | Human Patient | | TFTSYGISWVRQAPGQGLEWMGWISA | |
| | | | | | | | | | YNGNTNYAQKLQGRVTMTTDTSTSTAY | |
| | | | | | | | | | MELRSLRSDDTAVYYCARDGELLGWFD | |
| | | | | | | | | | PWGQGTLVTVSS | |
| CnC2t1p1_ | Ab | SARS-CoV2 | | SARS-CoV2 | | S; RBD | B-cells; SARS-CoV2 | 249 | EVQLVESGGGLVQPGRSLRLSCTASGFT | 1328 |
| D6 | | | | | | | Human Patient | | FGDYAMSWFRQAPGKGLEWVGFIRSK | |
| | | | | | | | | | AYGGTTEYAASVKGRFTISRDDSKSIAYL | |
| | | | | | | | | | QMNSLKTEDTAVYYCTRVRRLWFGSYY | |
| | | | | | | | | | YGMDVWGQGTTVTVSS | |
| CnC2t1p1_ | Ab | SARS-CoV2 | | SARS-CoV2 | | S; RBD | B-cells; SARS-CoV2 | 250 | EVQLVESGGGLVQPGRSLRLSCTASGFT | 1329 |
| E12 | | | | | | | Human Patient | | FGDYAMSWFRQAPGKGLEWVGFIRSK | |
| | | | | | | | | | AYGGTTEYAASVKGRFTISRDDSKSIVYL | |
| | | | | | | | | | QMNSLKTEDTAVYYCTRVRRLWFGSYY | |
| | | | | | | | | | YGMDVWGQGTTVTVSS | |
| CnC2t1p1_ | Ab | SARS-CoV2 | | SARS-CoV2 | | S; RBD | B-cells; SARS-CoV2 | 251 | QVQLVQSGAEVKNPGASVKVSCKASGY | 1330 |
| E8 | | | | | | | Human Patient | | IFTNYYIHWVRQAPGQGLEWVGWIHSL | |
| | | | | | | | | | SGGTSYAQKFQGRVTLTRDASIRTAYME | |
| | | | | | | | | | LSRLGSDDTALYYCARASVSTITDFDYWG | |
| | | | | | | | | | QGTLVAVSS | |
| CnC2t1p1_ | Ab | SARS-CoV2 | | SARS-CoV2 | | S; RBD | B-cells; SARS-CoV2 | 252 | QVQLVQSGAEVKKPGASVKVSCKASGYI | 1331 |
| G6 | | | | | | | Human Patient | | FTNYYIHWVRQAPGQGLEWVGWIHSL | |
| | | | | | | | | | SGGTSYAQKFQGRVTLTRDAPIRTAYME | |
| | | | | | | | | | LSGLGSDDTAVYYCARASVATITDFDYW | |
| | | | | | | | | | GQGTLVAVSS | |
| CoV2- | Ab | SARS-CoV1, | | | SARS-CoV2 | S; non- | B-cells; SARS-CoV2 | 253 | QVQLVESGGGVVQPGRSLRLSCAASGF | 1332 |
| 2006 | | SARS-CoV2 | | | | RBC | Human Patient | | TFSYYAILWFRQAPGKGLEWVAIISYDGS | |
| | | | | | | | | | NKYYADSVKGRFTISRDNSKNTLYLQMN | |
| | | | | | | | | | SLRPEDTAVYYCARPQSGGYYAPLDYW | |
| | | | | | | | | | GQGTLVTVSS | |
| CoV2- | Ab | SARS-CoV1, | | | SARS-CoV2 | S; RBD | B-cells; SARS-CoV2 | 254 | QVQLVESGGGVVQPGRSLRLSCAASGF | 1333 |
| 2007 | | SARS-CoV2 | | | | | Human Patient | | TFSRYGMHWVRQAPGKGLEWVGIISYD | |
| | | | | | | | | | ASDKTYAESVKGRFTISRDNSKNTLYLQ | |
| | | | | | | | | | MNSLRAEDTAVYYCAKVSATYYYYYYG | |
| | | | | | | | | | MDVWGQGTTVTVSS | |
| CoV2- | Ab | SARS-CoV1, | | | SARS-CoV2 | S; non- | B-cells; SARS-CoV2 | 255 | QVQLVESGGGVVQPGRSLRLSCAASGF | 1334 |
| 2009 | | SARS-CoV2 | | | | RBD | Human Patient | | TFSTYAMHWVRQAPGKGLEWVAVISY | |
| | | | | | | | | | DGSNKYYADSVKGRFTISRDNPKNTLYL | |
| | | | | | | | | | QMNSLRAEDTAVYYCARDTATYVLLWS | |
| | | | | | | | | | GDFNLDYWGQGTLVTVSS | |

| | | | | | | SEQ | | SEQ | | |
|---|---|---|---|---|---|---|---|---|---|---|
| | | Heavy V | Heavy J | Light V | Light J | ID | | ID | | |
| Name | VL | Gene | Gene | Gene | Gene | NO.: | CDRH3 | NO.: | CDRL3 | Sources |
| CC6.30 | DIQMTQSPSSLSASVGDRVTITCRASQ | IGHV1-69 | IGHJ5 | IGKV1-39 | IGKJ3 | 2330 | ARDFRYCSST | 3532 | QQSYSTPR | Thomas Rogers et al., |
| | NISSYLNWYQQEAGKAPKLLIYAASSL | (Human) | (Human) | (Human) | (Human) | | RCYFWFDP | | T | 2020 |
| | QSGVPSRFSGSGSGTDFTLTISSLQPED | | | | | | | | | (https://science.science |
| | FATYYCQQSYSTPRTFGQGTKVDIK | | | | | | | | | mag.org/content/early/ |
| | | | | | | | | | | 2020/06/15/science.abc |
| | | | | | | | | | | 7520) |
| CC6.31 | DIQMTQSPSSLSASVGDRVTITCRASQ | IGHV1-46 | IGHJ4 | IGKV1-17 | IGKJ4 | 2331 | ARWYDSTGSI | 3533 | LQHNSYPIL | Thomas Rogers et al., |
| | GIRNDLGWYQQKPGKAPKRLIYAASSL | (Human) | (Human) | (Human) | (Human) | | DY | | T | 2020 |
| | QSGVPSRFSGSGSGTEFTLTISSLQPED | | | | | | | | | (https://science.science |
| | FATYYCLQHNSYPILTFGGGTKLEIK | | | | | | | | | mag.org/content/early/ |
| | | | | | | | | | | 2020/06/15/science.abc |
| | | | | | | | | | | 7520) |
| CC6.32 | QLVLTQPPSVSVAPGKTARITCGGNNI | IGHV3-9 | IGHJ4 | IGLV3-21 | IGLJ6 | 2332 | AKDQGYSYG | 3534 | QVWDSSS | Thomas Rogers et al., |
| | GSKSVYWYQQKPGQAPVLVVYDDSD | (Human) | (Human) | (Human) | (Human) | | NYFDY | | DHPYV | 2020 |
| | RPSGIPERFSGSNSGNTATLTISRVEAG | | | | | | | | | (https://science.science |
| | DEADYYCQVWDSSSDHPYVFGSGTKV | | | | | | | | | mag.org/content/early/ |
| | TVL | | | | | | | | | 2020/06/15/science.abc |
| | | | | | | | | | | 7520) |
| CC6.33 | EIVLTQSPGTLSLSPGERATLSCRASQS | IGHV1-69 | IGHJ4 | IGKV3-20 | IGKJ1 | 2333 | ALRNQWDLL | 3535 | QHYGSSL | Thomas Rogers et al., |
| | VSSSYLAWYQQKPGQAPRLLIYGASSR | (Human) | (Human) | (Human) | (Human) | | VY | | WT | 2020 |
| | ATGIPDRFSGSGSGTDFTLTISRLEPED | | | | | | | | | (https://science.science |
| | FAVYYCQHYGSSLWTFGQGTKLEIK | | | | | | | | | mag.org/content/early/ |
| | | | | | | | | | | 2020/06/15/science.abc |
| | | | | | | | | | | 7520) |
| Clone11- | DVLMTQTPLSLPVSLGDQASISCRSSQ | IGHV1-69 | IGHJ3 | IGKV1-117 | IGKJ5 | 2334 | ARRGYGSSYT | 3536 | FQGSHVPL | Nadezhda Antipova et |
| 9 | SIVHSNGNTYLEWYLQKPGQSPKLLIY | (Mouse) | (Mouse) | (Mouse) | (Mouse) | | WFAY | | T | al., 2020 |
| | KVSNRFSGVPDRFSGSGSGTDFTLKIS | | | | | | | | | |
| | RVEAEDLGVYYCFQGSHVPLTFGAGT | | | | | | | | | |
| | KLELK | | | | | | | | | |
| CnC2t1p1_ | EIVLTQSPATLSLSPGERATLSCRASQS | IGHV1-69 | IGHJ4 | IGKV3-11 | IGKJ4 | 2335 | ARVSGYDSSG | 3537 | QQRSNWP | Christoph Kreer et al., |
| B10 | VSSYLAWYQQKPGQAPRLLIYDASNR | (Human) | (Human) | (Human) | (Human) | | YWGDY | | PALT | 2020 |
| | ATGIPARFSGSGSGTDFTLTISSLEPEDF | | | | | | | | | (https://doi.org/10.101 |
| | AVYYCQQRSNWPPALTFGGGTKVEIK | | | | | | | | | 6/j.cell.2020.06.044) |
| CnC2t1p1_ | QSALTQPASVSGSPGQSITISCTGTSSD | IGHV1-18 | IGHJ5 | IGLV2-23 | IGLJ3 | 2336 | ARDGELLGW | 3538 | CSYAGSST | Christoph Kreer et al., |
| B4 | VGSYNLVSWYQQHPGKAPKLMIYEGS | (Human) | (Human) | (Human) | (Human) | | FDP | | WV | 2020 |
| | KRPSGVSNRFSGSKSGNTASLTISGLQ | | | | | | | | | (https://doi.org/10.101 |
| | AEDEADYYCCSYAGSSTWVFGGGTKL | | | | | | | | | 6/j.cell.2020.06.044) |
| | TVL | | | | | | | | | |
| CnC2t1p1_ | DIVMTQSPLSLPVTPGEPASISCRSSQS | IGHV3-49 | IGHJ6 | IGKV2-28 | IGKJ3 | 2337 | TRVRRLWFGS | 3539 | MQALQTP | Christoph Kreer et al., |
| D6 | LLHSNGYNYLDWYLQKPGQSPQLLIYL | (Human) | (Human) | (Human) | (Human) | | YYYGMDV | | GT | 2020 |
| | GSNRASGVPDRFSGSGSGTDFTLKISR | | | | | | | | | (https://doi.org/10.101 |
| | VEAEDVGVYYCMQALQTPGTFGPGT | | | | | | | | | 6/j.cell.2020.06.044) |
| | KVDIK | | | | | | | | | |
| CnC2t1p1_ | DIVMTQSPLSLPVTPGEPASISCRSSQS | IGHV3-49 | IGHJ6 | IGKV2-28 | IGKJ3 | 2338 | TRVRRLWFGS | 3540 | MQALQTP | Christoph Kreer et al., |
| E12 | LLHSNGYNYLDWYLQKPGQSPQLLIYL | (Human) | (Human) | (Human) | (Human) | | YYYGMDV | | GT | 2020 |
| | GSNRASGVPDRFSGSGSGTDFTLKISR | | | | | | | | | (https://doi.org/10.101 |
| | VEAEDVGVYYCMQALQTPGTFGPGT | | | | | | | | | 6/j.cell.2020.06.044) |
| | KVDIK | | | | | | | | | |
| CnC2t1p1_ | QSALTQPASVSGSPGQSITISCTGTSGD | IGHV1-2 | IGHJ4 | IGLV2-23 | IGLJ3 | 2339 | ARASVSTITDF | 3541 | CSYAGVRT | Christoph Kreer et al., |
| E8 | VGSYNLVSWYQQHPGKAPKLVIYEAT | (Human) | (Human) | (Human) | (Human) | | DY | | VV | 2020 |
| | KRPSGVSNRFFASKSGNTASLTISGLQ | | | | | | | | | (https://doi.org/10.101 |
| | AEDEADYYCCSYAGVRTVVFGGGTKL | | | | | | | | | 6/j.cell.2020.06.044) |
| | TVL | | | | | | | | | |
| CnC2t1p1_ | QSALTQPASVSGSPGQSITISCTGTSGD | (Human) | IGHJ4 | IGLV2-23 | IGLJ3 | 2340 | ARASVATITDF | 3542 | CSYAGVRT | Christoph Kreer et al., |
| G6 | IGSYNLVSWYQQYPGKAPKLIIYEASKR | IGHV1-2 | (Human) | (Human) | (Human) | | DY | | VV | 2020 |
| | PSGVSNRFFASKSGNTASLTISGLQAE | | | | | | | | | (https://doi.org/10.101 |
| | DEADYYCCSYAGVRTVVFGGGTKLTVL | | | | | | | | | 6/j.cell.2020.06.044) |
| CoV2- | EIVLTQSPGTLSLSPGERATLSCRASQS | IGHV3-30- | IGHJ4 | IGKV3-20 | IGKJ1 | 2341 | ARPQSGGYYA | 3543 | QQYGSSP | Seth Zost et al., 2020 |
| 2006 | VSSSYLAWYQQKPGQAPRLLIYGASSR | 3 (Human) | (Human) | (Human) | (Human) | | PLDY | | WT | (https://www.nature.co |
| | ATGIPDRFSGSGSGTDFTLTISRLEPED | | | | | | | | | m/articles/s41591-020- |
| | FAVYYCQQYGSSPWTFGQGTKVEIK | | | | | | | | | 0998-x) |
| CoV2- | DIQMTQSPSSLSASVGDRVTITCQASQ | IGHV3-30 | IGHJ6 | IGKV1-33 | IGKJ3 | 2342 | AKVSATYYYYY | 3544 | QQYDNLLF | Seth Zost et al., 2020 |
| 2007 | DISTYLNWYQQKPGKAPKLLIYDASNL | (Human) | (Human) | (Human) | (Human) | | YGMDV | | T | (https://www.nature.co |
| | ETGVPSRFSGSGSGTDFTFTISSLQPED | | | | | | | | | m/articles/s41591-020- |
| | IATYYCQQYDNLLFTFGPGTKVDVK | | | | | | | | | 0998-x) |
| CoV2- | QSALTQPASVSGSPGQSITISCTGTSGD | IGHV3-30 | IGHJ4 | IGLV2-14 | IGLJ3 | 2343 | ARDTATYVLL | 3545 | SSYTSSSTL | Seth Zost et al., 2020 |
| 2009 | VGAYNYVSWYQQHPVKAPKLMIYDV | (Human) | (Human) | (Human) | (Human) | | WSGDFNLDY | | WV | (https://www.nature.co |
| | SKRPSGVSNRFSGSKSGNTASLTISGLQ | | | | | | | | | m/articles/s41591-020- |
| | TEDEADYYCSSYTSSSTLWVFGGGTKL | | | | | | | | | 0998-x) |
| | TVL | | | | | | | | | |

| | | | | | Not | | | | | |
|---|---|---|---|---|---|---|---|---|---|---|
| | Ab | | | Neutral- | Neutral- | | | SEQ | | SEQ |
| | or | | Doesn't | ising | ising | Protein + | | ID | | ID |
| Name | Nb | Binds to | Bind to | Vs | Vs | Epitope | Origin | NO.: | VH or VHH | NO.: |
| CoV2- | Ab | SARS-CoV1, | | | SARS-CoV2 | S; non- | B-cells; SARS-CoV2 | 256 | QVQLVESGGGVVQPGRSLRLSCAASGF | 1335 |
| 2011 | | SARS-CoV2 | | | | RBD | Human Patient | | TFSTYAMHWVRQAPGKGLEWVTLISYD | |
| | | | | | | | | | GGNKYYADSVKGRFTISRDNSKNTLYLQ | |
| | | | | | | | | | MNSLRAEDAAVYFCARGHTGNYYYGM | |
| | | | | | | | | | DVWGQGTTVTVSS | |
| CoV2- | Ab | SARS-CoV1, | | | SARS-CoV2 | S; non- | B-cells; SARS-CoV2 | 257 | QVHLVESGGGVVQPGRSLRLSCAASGF | 1336 |
| 2013 | | SARS-CoV2 | | | | RBD | Human Patient | | TFSNYGMHWVRQAPGKGLEWVAVISG | |
| | | | | | | | | | DENNKFYANSVKGRFTISRDNSKNTLSL | |
| | | | | | | | | | QMNSLRPEDTARYYCAKGGDSSGWAW | |
| | | | | | | | | | DGDNPPTDYWGQGTLVIVSS | |
| CoV2- | Ab | SARS-CoV1, | | SARS-CoV2 | | S; RBD | B-cells; SARS-CoV2 | 258 | EVQLVESGGGLVQPGRSLRLSCAASGFT | 1337 |
| 2015 | | SARS-CoV2 | | (weak) | | | Human Patient | | FDDYAMHWVRQAPGKGLEWVSGISW | |
| | | | | | | | | | NSGSIGYADSVKGRFTISRDNAKNSLYLQ | |
| | | | | | | | | | MNSLRTEDTALYYCAMGPFGELLPYYFD | |
| | | | | | | | | | YWGQGTLVTVSS | |
| CoV2- | Ab | SARS-CoV1, | | | SARS-CoV2 | S; RBD | B-cells; SARS-CoV2 | 259 | QVQLVQSGAEVKKPGASVKVSCKVSGY | 1338 |
| 2016 | | SARS-CoV2 | | | | | Human Patient | | TLTELSIHWVRQAPGKGLEWMGGFDP | |
| | | | | | | | | | EDAETIYAQNFQGRVTMTEDTSTDTAY | |
| | | | | | | | | | MELSSLRSEDTALYYCAAAPAVMTAGW | |
| | | | | | | | | | FDPWGQGTLVSVSS | |
| CoV2- | Ab | SARS-CoV1, | | | SARS-CoV2 | S; non- | B-cells; SARS-CoV2 | 260 | QVQLEESGPGLVKPSETLSLTCTVSGGSI | 1339 |
| 2017 | | SARS-CoV2 | | | | RBD | Human Patient | | SSHYWSWIRQPPGKGLEWIGYIQDSGS | |
| | | | | | | | | | TNYNPSLKSRVTISVDTSKNQFSLRLSSVT | |
| | | | | | | | | | TADTAVYYCVRGAMAWFDPWGQGTL | |
| | | | | | | | | | VTVSS | |
| CoV2- | Ab | SARS-CoV2 | SARS- | | SARS-CoV1, | S; NTD | B-cells; SARS-CoV2 | 261 | QVQLVQSGAEVKKPGASVKVSCKVSGY | 1340 |
| 2021 | | | CoV1 | | SARS-CoV2 | | Human Patient | | TLIELSIHWVRQAPGKGLEWMGGFDPE | |
| | | | | | | | | | DVETIYAQKFQGRVTMTEDTSTDTAYM | |
| | | | | | | | | | ELSSLTSEDRAVYYCATQPAAIGGTPPYY | |
| | | | | | | | | | WGQGTLVTVSS | |
| CoV2- | Ab | SARS-CoV2 | SARS- | | SARS-CoV1, | S; non- | B-cells; SARS-CoV2 | 262 | QVQLVQSGAEVKKPGASVKVSCKASGY | 1341 |
| 2022 | | | CoV1 | | SARS-CoV2 | RBD | Human Patient | | TFTSYVISWVRQAPGQGLEWMGWISA | |
| | | | | | | | | | YNGNTNYAQKLQGRVTMTTDTSTSTAY | |
| | | | | | | | | | MELRSLRSDDTAVYYCARDQGPTYYYGS | |
| | | | | | | | | | GSPHYGMDVWGQGTTVTVSS | |
| CoV2- | Ab | SARS-CoV1, | | | SARS-CoV2 | S; non- | B-cells; SARS-CoV2 | 263 | QVHLVESGGGVVQPGRSLRLSCAASGF | 1342 |
| 2025 | | SARS-CoV2 | | | | RBD | Human Patient | | TFSNYGMHWVRQAPGKGLEWVAVISG | |
| | | | | | | | | | DENNKFYANSVKGRFTISRDNSKNTLSL | |
| | | | | | | | | | QMNSLRPEDTARYYCAKGGDSSGWAW | |
| | | | | | | | | | DGDNPPTDYWGQGTLVIVSS | |
| CoV2- | Ab | SARS-CoV2 | SARS- | | SARS-CoV1, | S; NTD | B-cells; SARS-CoV2 | 264 | QVQLVQSGAEVKKPGASVKVSCKVSGY | 1343 |
| 2026 | | | CoV1 | | SARS-CoV2 | | Human Patient | | TLTELSIHWVRQAPGKGLEWMGGFDP | |
| | | | | | | | | | EDGETVYAQKFQGRVTMTEDTSSDTAY | |
| | | | | | | | | | MELSSLRSEDTAVYYCATSFPIRGDPSYY | |
| | | | | | | | | | YYYYGMDVWGQGTTVTVSS | |
| CoV2- | Ab | SARS-CoV2 | SARS- | | SARS-CoV1, | S; non- | B-cells; SARS-CoV2 | 265 | QVQLVESGGGVVQPGRSLRLSCAASGFI | 1344 |
| 2027 | | | CoV1 | | SARS-CoV2 | RBD | Human Patient | | FSTYGMHWVRQAPGKGLEWVAVISYD | |
| | | | | | | | | | GSNKYNADSVKGRFTISRDNSKNTLYLQ | |
| | | | | | | | | | MNSLRVEDTAVYYCAIYGYYYYGLDVW | |
| | | | | | | | | | GQGTTVTVSS | |
| CoV2- | Ab | SARS-CoV1, | | | SARS-CoV2 | S; non- | B-cells; SARS-CoV2 | 266 | QVHLVESGGGVVQPGRSLRLSCAASGF | 1345 |
| 2028 | | SARS-CoV2 | | | | RBD | Human Patient | | SFRNYGMHWVRQAPGKGLEWVAVISG | |
| | | | | | | | | | DENNKFYANSVKGRFTISRDNSKNTLSL | |
| | | | | | | | | | QMNSLRPEDTARYYCAKGGDSSGWAW | |
| | | | | | | | | | DGDNPPTDYWGQGTLVIVSS | |
| CoV2- | Ab | SARS-CoV1, | | | SARS-CoV2 | S; non- | B-cells; SARS-CoV2 | 267 | QVQLQESGPGLVKPSGTLSLTCVVSGGS | 1346 |
| 2029 | | SARS-CoV2 | | | | RBD | Human Patient | | ISSSNWGWVRQPPGKGLEWIGEIYLSG | |
| | | | | | | | | | TTNYNPSLTSRVTISVDKSKNQFSLKLNS | |
| | | | | | | | | | VTAADTAIYYCARPTAGAGGAFDIWGQ | |
| | | | | | | | | | GTVVTVSS | |
| CoV2- | Ab | SARS-CoV1, | | | SARS-CoV2 | S; RBD | B-cells; SARS-CoV2 | 268 | QVTLKESGPVLVKPTETLTLTCTVSGFSLS | 1347 |
| 2031 | | SARS-CoV2 | | | | | Human Patient | | NARMGVSWIRQPPGKALEWLAHIFWN | |
| | | | | | | | | | DENSYSTSLKTRLTISKDTSKSQVVLNMT | |
| | | | | | | | | | NMDPVDTATYYCARTEWLLSDNWFDS | |
| | | | | | | | | | WGQGTLVTVSS | |
| CoV2- | Ab | SARS-CoV1, | | | SARS-CoV2 | S; RBD | B-cells; SARS-CoV2 | 269 | QVQLVQSGAEVKKPGASVKVSCKASGD | 1348 |
| 2032 | | SARS-CoV2 | | | | | Human Patient | | TFSSYYLHWVRQAPGQGLQWMGISNP | |
| | | | | | | | | | SGGSTTYAQKFQGRVTMTGDTSTSTVY | |
| | | | | | | | | | MELSSLRSEDTAVYYCARGGLVPAARNA | |
| | | | | | | | | | FDIWGQGTMVTVSS | |

| | | | | | | SEQ | | SEQ | | |
|---|---|---|---|---|---|---|---|---|---|---|
| | | Heavy V | Heavy J | Light V | Light J | ID | | ID | | |
| Name | VL | Gene | Gene | Gene | Gene | NO.: | CDRH3 | NO.: | CDRL3 | Sources |
| CoV2- | ITCRASQSISSYLNWYQQKPGKAPKLLI | IGHV3-30- | IGHJ6 | IGKV1-39 | IGKJ3 | 2344 | ARGHTGNYYY | 3546 | QQSYSTFT | Seth Zost et al., 2020 |
| 2011 | YAASSLQSGVPSRFGGSASGTDFTLTIS | 3 | (Human) | (Human) | (Human) | | GMDV | | | (https://www.nature.co |
| | SLQPEDFATYYCQQSYSTFTFGPGTKV | (Human) | | | | | | | | m/articles/s41591-020- |
| | DIK | | | | | | | | | 0998-x) |
| CoV2- | DIVMTQSPDFLAVSLGERATINCKSSQ | IGHV3-30 | IGHJ4 | IGKV4-1 | IGKJ4 | 2345 | AKGGDSSGW | 3547 | QQYYTAPL | Seth Zost et al., 2020 |
| 2013 | SVLHTPKNKNYLAWYKQKPGQPPKVL | (Human) | (Human) | (Human) | (Human) | | AWDGDNPPT | | T | (https://www.nature.co |
| | IYWASTRESGVPERFSGSGSGTDFTLII | | | | | | DY | | | m/articles/s41591-020- |
| | SSLQAEDAAVYYCQQYYTAPLTFGGGT | | | | | | | | | 0998-x) |
| | KVEIK | | | | | | | | | |
| CoV2- | EIVLTQSPATLSLSPGERATLSCRASQS | IGHV3-9 | IGHJ4 | IGKV3-11 | IGKJ2 | 2346 | AMGPFGELLP | 3548 | QQRSNWP | Seth Zost et al., 2020 |
| 2015 | VSSYLAWYQQKPGQAPRLLIYDTSNR | (Human) | (Human) | (Human) | (Human) | | YYFDY | | PYT | (https://www.nature.co |
| | ATGIPARFSGSGSGTDFTLTISSLEPED | | | | | | | | | m/articles/s41591-020- |
| | FAVYYCQQRSNWPPYTFGQGTKLEIK | | | | | | | | | 0998-x) |
| CoV2- | QSALTQPASVSGSPGQSITISCTGTSSD | IGHV1-24 | IGHJ5 | IGLV2-14 | IGLJ3 | 2347 | AAAPAVMTA | 3549 | SSYTSSTT | Seth Zost et al., 2020 |
| 2016 | VGGYHYVSWYQHHPGKAPKLIIYDVIK | (Human) | (Human) | (Human) | (Human) | | GWFDP | | WV | (https://www.nature.co |
| | RPSGVSNRFSGSKSGNTASLTISGLQA | | | | | | | | | m/articles/s41591-020- |
| | EDEAYYYCSSYTSSTTWVFGGGTRLTV | | | | | | | | | 0998-x) |
| | L | | | | | | | | | |
| CoV2- | QSVLTQPPSVSGAPGQRVTISCTGSSS | IGHV4-59 | IGHJ5 | IGLV1-40 | IGLJ1 | 2348 | VRGAMAWF | 3550 | QSFDSSLS | Seth Zost et al., 2020 |
| 2017 | NIGAGYNVHWYQQLPGTAPKLLIYGN | (Human) | (Human) | (Human) | (Human) | | DP | | GSDV | (https://www.nature.co |
| | NNRPSGVPDRFSGSKSGTSASLAITGL | | | | | | | | | m/articles/s41591-020- |
| | QAEDEADYYCQSFDSSLSGSDVFGTGT | | | | | | | | | 0998-x) |
| | KVSVL | | | | | | | | | |
| CoV2- | QSVLTQPPSASGTPGQRVTISCSGSSS | IGHV1-24 | IGHJ4 | IGLV1-47 | IGLJ2 | 2349 | ATQPAAIGGT | 3551 | AAWDASL | Seth Zost et al., 2020 |
| 2021 | NIGSNYVYWYQQLPGTAPKLLIYRNN | (Human) | (Human) | (Human) | (Human) | | PPYY | | SGHVV | (https://www.nature.co |
| | QRPSGVPDRFSGSKSGTSASLAISGLRS | | | | | | | | | m/articles/s41591-020- |
| | EDEADYYCAAWDASLSGHVVFGGGT | | | | | | | | | 0998-x) |
| | KLTVL | | | | | | | | | |
| CoV2- | DIVMAQTPLSLPVTPGEPASISCRSSQS | IGHV1-18 | IGHJ6 | IGKV2-40 | IGKJ2 | 2350 | ARDQGPTYYY | 3552 | MQRIEFP | Seth Zost et al., 2020 |
| 2022 | LLDSDDGNTYFDWYLQKPGQSPQLLI | (Human) | (Human) | (Human) | (Human) | | GSGSPHYGM | | WT | (https://www.nature.co |
| | YTLSYRASGVPDRFSGSGSGTDFTLKIN | | | | | | DV | | | m/articles/s41591-020- |
| | RVEAEDVGVYYCMQRIEFPWTFGQG | | | | | | | | | 0998-x) |
| | TKLEIK | | | | | | | | | |
| CoV2- | DIVMTQSPDFLAVSLGERATINCKSSQ | IGHV3-30 | IGHJ4 | IGKV4-1 | IGKJ4 | 2351 | AKGGDSSGW | 3553 | QQYYTAPL | Seth Zost et al., 2020 |
| 2025 | SVLHTPKNKNYLAWYKQKPGQPPKVL | (Human) | (Human) | (Human) | (Human) | | AWDGDNPPT | | T | (https://www.nature.co |
| | IYWASTRESGVPERFSGSGSGTDFTLII | | | | | | DY | | | m/articles/s41591-020- |
| | SSLQAEDAAVYYCQQYYTAPLTFGGGT | | | | | | | | | 0998-x) |
| | KVEIK | | | | | | | | | |
| CoV2- | DIQMTQSPSSLSASVGDRVTITCRASQ | IGHV1-24 | IGHJ6 | IGKV1-16 | IGKJ1 | 2352 | ATSFPIRGDPS | 3554 | QQYNSYP | Seth Zost et al., 2020 |
| 2026 | GITNYLAWFQQKPGKAPKSLIYAVSSL | (Human) | (Human) | (Human) | (Human) | | YYYYYYGMDV | | WT | (https://www.nature.co |
| | QSGVPSKFSGSGSGTDFTLTISSLQPED | | | | | | | | | m/articles/s41591-020- |
| | FATYYCQQYNSYPWTFGQGTKVEIK | | | | | | | | | 0998-x) |
| CoV2- | SYELTQPPSVSVSPGQTARITCSGDALP | IGHV3-30 | IGHJ6 | IGLV3-25 | IGLJ3 | 2353 | AIYGYYYYGLD | 3555 | QSADSSGT | Seth Zost et al., 2020 |
| 2027 | KQYAYWYQQKPGQAPVLVIYKDSERP | (Human) | (Human) | (Human) | (Human) | | V | | YFWV | (https://www.nature.co |
| | SGIPERFSGSSSGTTVTLTISGVQAEDE | | | | | | | | | m/articles/s41591-020- |
| | ADYYCQSADSSGTYFWVFGGGTKLTV | | | | | | | | | 0998-x) |
| | L | | | | | | | | | |
| CoV2- | DIVMTQSPDFLAVSLGERATINCKSSQ | IGHV3-30 | IGHJ4 | IGKV4-1 | IGKJ4 | 2354 | AKGGDSSGW | 3556 | QQYYTAPL | Seth Zost et al., 2020 |
| 2028 | SVLHTPKNKNYLAWYKQKPGQPPKVL | (Human) | (Human) | (Human) | (Human) | | AWDGDNPPT | | T | (https://www.nature.co |
| | IYWASTRESGVPERFSGSGSGTDFTLII | | | | | | DY | | | m/articles/s41591-020- |
| | SSLQAEDAAVYYCQQYYTAPLTFGGGT | | | | | | | | | 0998-x) |
| | KVEIK | | | | | | | | | |
| CoV2- | QSVLTQPPSVSGTPGQRVTISCSGSNS | IGHV4-4 | IGHJ3 | IGLV1-44 | IGLJ3 | 2355 | ARPTAGAGG | 3557 | SVWDDSL | Seth Zost et al., 2020 |
| 2029 | KIGSYSVNWYQQLPGTAPKLLIYRNNQ | (Human) | (Human) | (Human) | (Human) | | AFDI | | NGPL | (https://www.nature.co |
| | RPSGVPDRFFGSKSGTSASLAISGLQSE | | | | | | | | | m/articles/s41591-020- |
| | DEADYYCSVWDDSLNGPLFGGGTKLT | | | | | | | | | 0998-x) |
| | FV | | | | | | | | | |
| CoV2- | SYELTQPPSVSVSPGQTARITCSGDAW | IGHV2-26 | IGHJ5 | IGLV3-25 | IGLJ3 | 2356 | ARTEWLLSDN | 3558 | QSSDSSGV | Seth Zost et al., 2020 |
| 2031 | PNQYAYWYQQKPGQAPVLVIYKDTER | (Human) | (Human) | (Human) | (Human) | | WFDS | | V | (https://www.nature.co |
| | PSGIPERFSGSSSGTTVTLTISGVQAED | | | | | | | | | m/articles/s41591-020- |
| | EADYFCQSSDSSGVVFGGGTKLTVL | | | | | | | | | 0998-x) |
| CoV2- | DIQMTQSPSTLSASVGDRVTITCRASQ | IGHV1-46 | IGHJ3 | IGKV1-5 | IGKJ1 | 2357 | ARGGLVPAA | 3559 | QQYNSYS | Seth Zost et al., 2020 |
| 2032 | SISSWLAWYQQKPGKAPKLLIYKASSL | (Human) | (Human) | (Human) | (Human) | | RNAFDI | | WT | (https://www.nature.co |
| | ESGVPSRFSGSGSGTEFTLTISSLQPDD | | | | | | | | | m/articles/s41591-020- |
| | FATYYCQQYNSYSWTFGQGTKVEIK | | | | | | | | | 0998-x) |

| | | | | | Not | | | | | |
|---|---|---|---|---|---|---|---|---|---|---|
| | Ab | | | Neutral- | Neutral- | | | SEQ | | SEQ |
| | or | | Doesn't | ising | ising | Protein + | | ID | | ID |
| Name | Nb | Binds to | Bind to | Vs | Vs | Epitope | Origin | NO.: | VH or VHH | NO.: |
| CoV2- | Ab | SARS-CoV1, | | | SARS-CoV2 | S; non- | B-cells; SARS-CoV2 | 270 | QVQLQESGPGLVKPSGTLSLTCVVSGGS | 1349 |
| 2033 | | SARS-CoV2 | | | | RBD | Human Patient | | ISSSNWGWVRQPPGKGLEWIGEIYHSG | |
| | | | | | | | | | TTNYNPSLRSRVTISVDKSKNQLSLKLNS | |
| | | | | | | | | | VTAADTAIYYCARPTAGAGGAFDTWGQ | |
| | | | | | | | | | GTMVTVSA | |
| CoV2- | Ab | SARS-CoV1, | | | SARS-CoV2 | S; non- | B-cells; SARS-CoV2 | 271 | QVQLVQSGAEVKKPGASVKVSCKASGY | 1350 |
| 2034 | | SARS-CoV2 | | | | RBD | Human Patient | | TFTTYGISWVRQAPGQGLEWMGWISA | |
| | | | | | | | | | YNGNSNYGKKFQGRVTMTADTSTSTAY | |
| | | | | | | | | | MELRSLRSDDTAVYYCARDLPIKVVVPA | |
| | | | | | | | | | ADYNWFDPWGQGTLVTVSS | |
| CoV2- | Ab | SARS-CoV2 | SARS- | | SARS-CoV1, | S; non- | B-cells; SARS-CoV2 | 272 | QITLKESGPTLVKPTQTLTLTCTFSGFSLN | 1351 |
| 2035 | | | CoV1 | | SARS-CoV2 | RBD | Human Patient | | TNGVAVGWIRQPPGKALEWLALIYWD | |
| | | | | | | | | | DDKRYSPSLKSRLTITKDTSKNQVVLTMT | |
| | | | | | | | | | NMDPVDTATYYCAHRRGILTEDAFDIW | |
| | | | | | | | | | GQGTMVTVSS | |
| CoV2- | Ab | SARS-CoV2 | SARS- | SARS-CoV2 | | S; RBD | B-cells; SARS-CoV2 | 273 | EVQLVESGGGLVQPGESLRLSCAASGIT | 1352 |
| 2037 | | | CoV1 | | | | Human Patient | | VSSNYMSWVRQAPGKGLEWVSVIYSG | |
| | | | | | | | | | GSTFYADSVKGRFIISRHNSKNTLYLQM | |
| | | | | | | | | | NSLRAEDTAVYYCARDLNEHGLDVWG | |
| | | | | | | | | | QGTTVSVSS | |
| CoV2- | Ab | SARS-CoV2 | SARS- | | SARS-CoV1, | S; RBD | B-cells; SARS-CoV2 | 274 | QVQLVQSGAEVKKPGASVKVSCKASGY | 1353 |
| 2039 | | | CoV1 | | SARS-CoV2 | | Human Patient | | TFTSYYMHWVRQAPGQGLEWMGIINP | |
| | | | | | | | | | SAGSTSYAQKFQGRVTMTRDTSTSTVY | |
| | | | | | | | | | MELSSLRSEDTAVYYCARGTLIPAHRGAF | |
| | | | | | | | | | DIWGQGTMVTVSS | |
| CoV2- | Ab | SARS-CoV1, | | | SARS-CoV2 | S; non- | B-cells; SARS-CoV2 | 275 | QVQLQESGPGLVKPSQTLSLTCTVSGGSI | 1354 |
| 2041 | | SARS-CoV2 | | | | RBD | Human Patient | | SSGTYYWSWIRQPAGKGLEWIGRFYTS | |
| | | | | | | | | | GSTNYNPSLKSRVTISVDASKNQFSLKLS | |
| | | | | | | | | | SVTAADTAVYYCARARPDYYYYYAMDV | |
| | | | | | | | | | WGQGTTVTVSS | |
| CoV2- | Ab | SARS-CoV2 | SARS- | SARS-CoV2 | | S; RBD | B-cells; SARS-CoV2 | 276 | EVQLVESGGGLVQPGRSLRLSCAASGFT | 1355 |
| 2046 | | | CoV1 | | | | Human Patient | | FDDYAMHWVRQAPGKGLEWVSGISW | |
| | | | | | | | | | NSGSIAYTDSVKGRFTISRDNAKNSLYLQ | |
| | | | | | | | | | MNSLRAEDTALYYCAKAHSTGHQYYYG | |
| | | | | | | | | | MDVWGQGTTVTVSS | |
| CoV2- | Ab | SARS-CoV2 | SARS- | SARS-CoV2 | | S; RBD | B-cells; SARS-CoV2 | 277 | QVQLVQSGAEVKKPGASVKVSCKASGY | 1356 |
| 2050 | | | CoV1 | | | | Human Patient | | TFTDYYMHWVRQAPGQGLEWMGWI | |
| | | | | | | | | | NPNSRGTNYAQKFQGRVTMTRDTSIST | |
| | | | | | | | | | VYMELSRLTSDDTAVYYCARVVVLGYGR | |
| | | | | | | | | | PNNYYDGRNVWDYWGQGTLVTVSS | |
| CoV2- | Ab | SARS-CoV2 | SARS- | | SARS-CoV1, | S; RBD | B-cells; SARS-CoV2 | 278 | QVTLRESGPALVKPTQTLSLTCTFSGFSL | 1357 |
| 2051 | | | CoV1 | | SARS-CoV2 | | Human Patient | | GTSGMCVSWIRQPPGKALEWLARIDW | |
| | | | | | | | | | DDDKYYSTSLKTRLTISKDTSKNQVVLTM | |
| | | | | | | | | | TNMDPVDTATYYCARGVVTYDYWGQG | |
| | | | | | | | | | TLVTVSS | |
| CoV2- | Ab | SARS-CoV2 | SARS- | | SARS-CoV1, | S; non- | B-cells; SARS-CoV2 | 279 | QVQLVQSGAEVKKPGSSVKVSCKASGD | 1358 |
| 2054 | | | CoV1 | | SARS-CoV2 | RBD | Human Patient | | TFSSYTINWVRQAPGQGLEWMGRIIPIL | |
| | | | | | | | | | GIPNYAQKFQGRVTITADKSTSTAFMEL | |
| | | | | | | | | | SSLRSEDTAVYYCARGRGYSNYGASYYM | |
| | | | | | | | | | DVWGKGTTVTVSS | |
| CoV2- | Ab | SARS-CoV1, | | | SARS-CoV2 | S; RBD | B-cells; SARS-CoV2 | 280 | EVQLVESGGGLVQPGRSLRLSCAASGFT | 1359 |
| 2055 | | SARS-CoV2 | | | | | Human Patient | | FDDYAMNWVRQPPGKGLEWVSGISW | |
| | | | | | | | | | NSDSIGYADSVKGRFTISRDNAKNSLYLQ | |
| | | | | | | | | | MNSLRAEDTAMYYCAKGRGAGYTSYM | |
| | | | | | | | | | DVWGKGTTVTVSS | |
| CoV2- | Ab | SARS-CoV2 | SARS- | SARS-CoV2 | | S; RBD | B-cells; SARS-CoV2 | 281 | QVQLAQSGAEVKKPGASVKVSCKAAGY | 1360 |
| 2064 | | | CoV1 | | | | Human Patient | | TFTSYDINWVRQATGQGLEWMGWMN | |
| | | | | | | | | | SNSGNAGYAQKFQGRVTMTRDTSTSTA | |
| | | | | | | | | | YMELSSLTSDDTAVYYCARMRTGWPTH | |
| | | | | | | | | | GRPDDFWGRGTLVTVSS | |
| CoV2- | Ab | SARS-CoV2 | SARS- | SARS-CoV2 | | S; RBD | B-cells; SARS-CoV2 | 282 | EVQLVESGGGLVQPGGSLRLSCAASGFT | 1361 |
| 2068 | | | CoV1 | | | | Human Patient | | VSSNYMSWVRQAPGKGLEWVSVIYPG | |
| | | | | | | | | | GSAFYADSVKGRFTISRHNSNNTLCLQM | |
| | | | | | | | | | NSLRTEDTAVYYCARSYDILTGYRDAFDI | |
| | | | | | | | | | WGQGTMVTVSS | |
| CoV2- | Ab | SARS-CoV2 | SARS- | | SARS-CoV1, | S; RBD | B-cells; SARS-CoV2 | 283 | QVQLQQWGAGLLKPSETLSLTCAVSGG | 1362 |
| 2070 | | | CoV1 | | SARS-CoV2 | | Human Patient | | SFSAYYWSWIRQPPGKGLEWIGEINHS | |
| | | | | | | | | | GSTNYNPSLRSRVTISVDTSKNQFSLKLSS | |
| | | | | | | | | | VTAADTAVYYCARVGYSQGYYYYYMDV | |
| | | | | | | | | | WGKGTTVTVSS | |

| | | | | | | SEQ | | SEQ | | |
|---|---|---|---|---|---|---|---|---|---|---|
| | | Heavy V | Heavy J | Light V | Light J | ID | | ID | | |
| Name | VL | Gene | Gene | Gene | Gene | NO.: | CDRH3 | NO.: | CDRL3 | Sources |
| CoV2- | QSVLTQPPSASGTPGQRVTISCSGSNS | IGHV4-4 | IGHJ3 | IGLV1-44 | IGLJ3 | 2358 | ARPTAGAGG | 3560 | SVWDDSL | Seth Zost et al., 2020 |
| 2033 | KIGSYSVNWYQQLPGTAPKLLIYRNNQ | (Human) | (Human) | (Human) | (Human) | | AFDT | | NGPL | (https://www.nature.co |
| | RPSGVPDRFSGSKSGTSASLAISGLQSE | | | | | | | | | m/articles/s41591-020- |
| | DEADYYCSVWDDSLNGPLFGGGTKLT | | | | | | | | | 0998-x) |
| | FL | | | | | | | | | |
| CoV2- | DIQMTQSPSSLSASVGDRVTITCRASQ | IGHV1-18 | IGHJ5 | IGKV1-39 | IGKJ4 | 2359 | ARDLPIKVV | 3561 | QQSYSTPP | Seth Zost et al., 2020 |
| 2034 | SISSYLNWYQQKPGKAPKLLIYAASSLQ | (Human) | (Human) | (Human) | (Human) | | VPAADYNWF | | T | (https://www.nature.co |
| | SGVPSRFSGSGSGTDFTLTISSLQPEDF | | | | | | DP | | | m/articles/s41591-020- |
| | ATYYCQQSYSTPPTFGGGTKVQIK | | | | | | | | | 0998-x) |
| CoV2- | DIQMTQSPSSLSASVGDRVTITCRASQ | IGHV2-5 | IGHJ3 | IGKV1-39 | IGKJ1 | 2360 | AHRRGILTE | 3562 | QQSYNTPR | Seth Zost et al., 2020 |
| 2035 | SISSYLNWYQQRPGKAPKLLIYAASSLQ | (Human) | (Human) | (Human) | (Human) | | DAFDI | | T | (https://www.nature.co |
| | SGVPSRFSGSGYGTDFTLTISSLQPEDF | | | | | | | | | m/articles/s41591-020- |
| | ATYYCQQSYNTPRTFGQGTKVEIK | | | | | | | | | 0998-x) |
| CoV2- | DIQMTQSPSSVSASVGDRVTITCRASQ | IGHV3-53 | IGHJ6 | IGKV1-12 | IGKJ5 | 2361 | ARDLNEHGL | 3563 | QQTNSFPT | Seth Zost et al., 2020 |
| 2037 | GISSWLAWYQQKPGKAPKLLIYAASSL | (Human) | (Human) | (Human) | (Human) | | DV | | | (https://www.nature.co |
| | QSGVPSRFSGSGSGTDFTLTISSLQPED | | | | | | | | | m/articles/s41591-020- |
| | FATYYCQQTNSFPTFGQGTRLEIR | | | | | | | | | 0998-x) |
| CoV2- | EIVLTQSPGTLSLSPGERATLSCRASQS | IGHV1-46 | IGHJ3 | IGKV3-20 | IGKJ3 | 2362 | ARGTLIPAH | 3564 | QQYGNSP | Seth Zost et al., 2020 |
| 2039 | VSSSFLAWYQQKPGQAPRLLIYGASN | (Human) | (Human) | (Human) | (Human) | | RGAFDI | | Q | (https://www.nature.co |
| | RATGIPDRFSGSGSGTDFTLTISRLEPE | | | | | | | | | m/articles/s41591-020- |
| | DFAVYYCQQYGNSPQFGPGTKVDIK | | | | | | | | | 0998-x) |
| CoV2- | DIQMTQSPSSLSASVGDRVTITCRASQ | IGHV4-61 | IGHJ6 | IGKV1-5 | IGKJ1 | 2363 | ARARPDYYY | 3565 | QQYNSYST | Seth Zost et al., 2020 |
| 2041 | SISNWLAWYQQKPGKAPKLLIYKASSL | (Human) | (Human) | (Human) | (Human) | | YYAMDV | | WT | (https://www.nature.co |
| | ESGVPSRFSGSGSGTEFTLTISSLQPDD | | | | | | | | | m/articles/s41591-020- |
| | FATYYCQQYNSYSTWTFGQGTKVEIK | | | | | | | | | 0998-x) |
| CoV2- | DIQMTQSPSSLSASVGDRVTITCRASQ | IGHV3-9 | IGHJ6 | IGKV1-39 | IGKJ2 | 2364 | AKAHSTGHQ | 3566 | QQSYNTPY | Seth Zost et al., 2020 |
| 2046 | SISSFLNWYQQKPGKAPKLLIYAAFNL | (Human) | (Human) | (Human) | (Human) | | YYYGMDV | | T | (https://www.nature.co |
| | QSGVPSRFSGSGSGTDFTLTISSLQSED | | | | | | | | | m/articles/s41591-020- |
| | FATYYCQQSYNTPYTFGQGTKLEIK | | | | | | | | | 0998-x) |
| CoV2- | QSVLTQPPSASGTPGQRVIISCSGSSSN | IGHV1-2 | IGHJ4 | IGLV1-44 | IGLJ2 | 2365 | ARVVVLGYG | 3567 | AAWDDSL | Seth Zost et al., 2020 |
| 2050 | IGSNTVKWYHQLPGTAPKLLICSNNQR | (Human) | (Human) | (Human) | (Human) | | RPNNYYDGR | | NALV | (https://www.nature.co |
| | PSGVPDRFSGSKSDTSASLAISGLQSED | | | | | | NVWDY | | | m/articles/s41591-020- |
| | EADYYCAAWDDSLNALVFGGGTKLTV | | | | | | | | | 0998-x) |
| | L | | | | | | | | | |
| CoV2- | DIQMTQSPSSLSASVGDRVTITCRASQ | IGHV2-70 | IGHJ4 | IGKV1-39 | IGKJ5 | 2366 | ARGVVTYDY | 3568 | QQSYSTPG | Seth Zost et al., 2020 |
| 2051 | SIAGYLNWYQQKPGKAPKLLIYGTTSL | (Human) | (Human) | (Human) | (Human) | | | | T | (https://www.nature.co |
| | QSGVPVRFSGSGSGTDFTLTISSLQPE | | | | | | | | | m/articles/s41591-020- |
| | DFATYYCQQSYSTPGTFGQGTRLEIK | | | | | | | | | 0998-x) |
| CoV2- | DIQMTQSPSSLSASVGDRVTITCQASQ | IGHV1-69 | IGHJ6 | IGKV1-33 | IGKJ2 | 2367 | ARGRGYSNY | 3569 | QQSDNLP | Seth Zost et al., 2020 |
| 2054 | DINHYLNWYQQKPGKAPKLLIYDASN | (Human) | (Human) | (Human) | (Human) | | GASYYMDV | | MYT | (https://www.nature.co |
| | LETGVPSRFSGSGSGTDFTFTITSLQPE | | | | | | | | | m/articles/s41591-020- |
| | DVATYYCQQSDNLPMYTFGQGTKLEI | | | | | | | | | 0998-x) |
| | K | | | | | | | | | |
| CoV2- | SYVLTQPPSVSVAPGKTARITCEGNNI | IGHV3-9 | IGHJ6 | IGLV3-21 | IGLJ2 | 2368 | AKGRGAGYTS | 3570 | QVWDSSS | Seth Zost et al., 2020 |
| 2055 | GSKSVHWYQQKPGQAPVLVVYDDSG | (Human) | (Human) | (Human) | (Human) | | YMDV | | DHHVV | (https://www.nature.co |
| | RPSGIPERFSGSNSGNTATLTISRVEAG | | | | | | | | | m/articles/s41591-020- |
| | DEADYFCQVWDSSSDHHVVFGGGTK | | | | | | | | | 0998-x) |
| | LTVL | | | | | | | | | |
| CoV2- | QSVLTQPPSASGTPGQRVTISCSGSNS | IGHV1-8 | IGHJ4 | IGLV1-44 | IGLJ2 | 2369 | ARMRTGWPT | 3571 | LVWDDSL | Seth Zost et al., 2020 |
| 2064 | NIGSYTVNWYQQFPGTAPKLLIYDNN | (Human) | (Human) | (Human) | (Human) | | HGRPDDF | | NGLV | (https://www.nature.co |
| | QRTSGVPDRFSGSKSGTSASLAISGLQ | | | | | | | | | m/articles/s41591-020- |
| | SEDEANYYCLVWDDSLNGLVFGGGTK | | | | | | | | | 0998-x) |
| | LTVL | | | | | | | | | |
| CoV2- | QSVLTQPPSVSGAPGQRVTISCTGSSS | IGHV3-53 | IGHJ3 | IGLV1-40 | IGLJ2 | 2370 | ARSYDILTG | 3572 | QSYDSRLS | Seth Zost et al., 2020 |
| 2068 | NIGSGSDVHWYQQLPGTAPKLLIYGN | (Human) | (Human) | (Human) | (Human) | | YRDAFDI | | GFVV | (https://www.nature.co |
| | TNRPSGVPDRFSGSKSGTSASLAITGL | | | | | | | | | m/articles/s41591-020- |
| | QAEDEADYYCQSYDSRLSGFVVFGGG | | | | | | | | | 0998-x) |
| | TKLTVL | | | | | | | | | |
| CoV2- | DIQMTQSPSSLSASVGDRVTITCRASQ | IGHV4-34 | IGHJ6 | IGKV1-39 | IGKJ4 | 2371 | ARVGYSQGY | 3573 | QQSYTTLL | Seth Zost et al., 2020 |
| 2070 | SISNYLNWYQQKPGKAPKLLIYAASSL | (Human) | (Human) | (Human) | (Human) | | YYYYMDV | | T | (https://www.nature.co |
| | QSGVPSRFSGSGSGTDFSLTISSLQPED | | | | | | | | | m/articles/s41591-020- |
| | FATYSCQQSYTTLLTFGGGTKVEIK | | | | | | | | | 0998-x) |

| | | | | | Not | | | | | |
|---|---|---|---|---|---|---|---|---|---|---|
| | Ab | | | Neutral- | Neutral- | | | SEQ | | SEQ |
| | or | | Doesn't | ising | ising | Protein + | | ID | | ID |
| Name | Nb | Binds to | Bind to | Vs | Vs | Epitope | Origin | NO.: | VH or VHH | NO.: |
| CoV2- | Ab | SARS-CoV2 | SARS- | SARS-CoV2 | | S; RBD | B-cells; SARS-CoV2 | 284 | QMQLVQSGPEVKKPGTSVKVSCKTSGF | 1363 |
| 2072 | | | CoV1 | | | | Human Patient | | TFTSSAIQWVRQARGQRLEWIGWIVVG | |
| | | | | | | | | | SGNTNYAQKFQERVTITRDMSTSTAYM | |
| | | | | | | | | | ELSSLRSEDTAVYYCAAPHCNRTSCYDAF | |
| | | | | | | | | | DLWGQGTMVTVSS | |
| CoV2- | Ab | SARS-CoV2 | SARS- | | SARS-CoV1, | S; RBD | B-cells; SARS-CoV2 | 285 | QVQLVQSGAEVKKPGSSVKVSCKASGG | 1364 |
| 2078 | | | CoV1 | | SARS-CoV2 | | Human Patient | | TFSSYSITWVRQAPGQGLEWMGRIIPVL | |
| | | | | | | | | | GIANYAQKFQDRVTITADKSTSTAYMEL | |
| | | | | | | | | | SSLRSEDTAVYYCARVGVSGFKSGSNWY | |
| | | | | | | | | | FDLWGRGTLVTVSS | |
| CoV2- | Ab | SARS-CoV2 | SARS- | | SARS-CoV1, | S; RBD | B-cells; SARS-CoV2 | 286 | EVQLVESGGGLVQPGGSLRLSCAASGLT | 1365 |
| 2080 | | | CoV1 | | SARS-CoV2 | | Human Patient | | VRSNYMTWVRQTPGKGLEWVSVIYSG | |
| | | | | | | | | | GSTFYADSVKGRFTISRDNSKNTVYLQM | |
| | | | | | | | | | NSLRAEDTAVYYCARDLVTYGLDVWGQ | |
| | | | | | | | | | GTTVTVSS | |
| CoV2- | Ab | SARS-CoV1, | | | SARS-CoV2 | S; RBD | B-cells; SARS-CoV2 | 287 | EVQLVESGGGVVRPGGSLRLSCAASGFI | 1366 |
| 2082 | | SARS-CoV2 | | | | | Human Patient | | FDDYDMTWVRQAPGKGLEWVSGISW | |
| | | | | | | | | | NGGNTGYADSVKGRFTISRDNAKNSLYL | |
| | | | | | | | | | QMNSLRAEDTALYHCAVIMSPIPRYSGY | |
| | | | | | | | | | DWAGGAFDIWGQGTMVTVSS | |
| CoV2- | Ab | SARS-CoV1, | | | SARS-CoV2 | S; RBD | B-cells; SARS-CoV2 | 288 | QVQLVESGGGVVQPGRSLRLSCAASGF | 1367 |
| 2083 | | SARS-CoV2 | | | | | Human Patient | | TFSNYGMHWVRQAPGKGLEWVAVMS | |
| | | | | | | | | | YDGSNKYYADSVKGRFTISRDNSKNTLYL | |
| | | | | | | | | | QMNSLRAEDTAVYYCAKNLGPYCSGGT | |
| | | | | | | | | | CYSLVGDYWGQGTLVTVSS | |
| CoV2- | Ab | SARS-CoV1, | | | SARS-CoV2 | S; RBD | B-cells; SARS-CoV2 | 289 | EVQLVESGGGVVRPGGSLRLSCAASGFI | 1368 |
| 2094 | | SARS-CoV2 | | | | | Human Patient | | FDDYDMTWVRQAPGKGLEWVSGINW | |
| | | | | | | | | | NGGSTGYADSVKGRFTISRDNAKNSLYL | |
| | | | | | | | | | QMNSLRAEDTALYHCAVIMSPIPRYSGY | |
| | | | | | | | | | DWAGDAFDIWGQGTMVTVSS | |
| CoV2- | Ab | SARS-CoV2 | SARS- | SARS-CoV2 | | S; RBD | B-cells; SARS-CoV2 | 290 | QVQLVQSGAEVKKPGASVKVSCKASGY | 1369 |
| 2096 | | | CoV1 | | | | Human Patient | | TFGSFDINWVRQATGQGLEWMGRMN | |
| | | | | | | | | | SNSGNTAYAQKFQGRVTMTRDTSTNTA | |
| | | | | | | | | | YMELSSLRSEDTAMYYCARMRSGWPTH | |
| | | | | | | | | | GRPDDFWGRGTLVTVSS | |
| CoV2- | Ab | SARS-CoV2 | SARS- | SARS-CoV2 | | S; RBD | B-cells; SARS-CoV2 | 291 | EVQLVESGGGLVQPGRSLRLSCAASGFT | 1370 |
| 2097 | | | CoV1 | | | | Human Patient | | FDDYAMHWVRQAPGKGLEWVSGISW | |
| | | | | | | | | | NSGTIGYADSVKGRFIISRDNAKNSLYLQ | |
| | | | | | | | | | MNSLRPEDTALYYCAKDIIRQGEDGMD | |
| | | | | | | | | | VWGQGTTVTVSS | |
| CoV2- | Ab | SARS-CoV2 | SARS- | SARS-CoV2 | | S; RBD | B-cells; SARS-CoV2 | 292 | EVQLLESGGGLIQPGGSLRLSCAASGFTF | 1371 |
| 2098 | | | CoV1 | | | | Human Patient | | SNYAMSWVRQAPGKGLEWVSGIISTSG | |
| | | | | | | | | | GATYNADSVRGRFTTSRDNSKNILYLQM | |
| | | | | | | | | | NSLRGEDTAVYYCVKGLFDWFPLWGQ | |
| | | | | | | | | | GTMVTVSS | |
| CoV2- | Ab | SARS-CoV1, | | SARS-CoV2 | | S; RBD | B-cells; SARS-CoV2 | 293 | EVQLVESGGGLVQPGGSLRLSCAASGFT | 1372 |
| 2103 | | SARS-CoV2 | | | | | Human Patient | | FSRHWMTWVRQAPGKGLEWVANIKQ | |
| | | | | | | | | | DGSEKYYVDSVKGRLTISRDNAKNSLYL | |
| | | | | | | | | | QMNSLRAEDTAVYYCARLGFYYGGADY | |
| | | | | | | | | | WGQGTLVTVSS | |
| CoV2- | Ab | SARS-CoV2 | SARS- | | SARS-CoV1, | S; RBD | B-cells; SARS-CoV2 | 294 | NVQLVESGGGLVQPGGSLRLSCAASGF | 1373 |
| 2108 | | | CoV1 | | SARS-CoV2 | | Human Patient | | TFHHYAMHWVRQAPGKGLEWVSGISG | |
| | | | | | | | | | SSDYRAYADSLKGRFTISRDYAKNSLWL | |
| | | | | | | | | | QMNSLTSEDTAFYYCAKGVDYGGKLAYF | |
| | | | | | | | | | DSWGQGTLVTVSS | |
| CoV2- | Ab | SARS-CoV2 | SARS- | | SARS-CoV1, | S; RBD | B-cells; SARS-CoV2 | 295 | QVQLVESGGGVVQPGRSLRLSCAASGF | 1374 |
| 2110 | | | CoV1 | | SARS-CoV2 | | Human Patient | | SFSSYVMNWVRQAPGKGqLEWVAVISY | |
| | | | | | | | | | DGSSKYYADSVKGRFTISRDNSKNTLYLQ | |
| | | | | | | | | | MNSLRAEDTAVYYCARDIDSGYDPTPVF | |
| | | | | | | | | | DYWGQGTLVTVSS | |
| CoV2- | Ab | SARS-CoV1, | | | SARS-CoV2 | S; RBD | B-cells; SARS-CoV2 | 296 | EVQLVESGGGLVQPGGSLRLSCAASGFT | 1375 |
| 2111 | | SARS-CoV2 | | | | | Human Patient | | FSSYDLHWVRQGTGKRLEWVSAIGTAG | |
| | | | | | | | | | DTYYLGSVKGRFTISRENAKNSLYLQMN | |
| | | | | | | | | | SLRAGDTAVYYCARVLYDSSGFYNWFDP | |
| | | | | | | | | | WGQGTLVTVSS | |
| CoV2- | Ab | SARS-CoV2 | SARS- | SARS-CoV2 | | S; RBD | B-cells; SARS-CoV2 | 297 | EVQLVESGGGLIQPGGSLRLSCAASEVT | 1376 |
| 2113 | | | CoV1 | | | | Human Patient | | VSSNYMSWVRQAPGKGLEWVSLIYSGG | |
| | | | | | | | | | TTYYADSVKGRFTISRDNSKNTLYLQMN | |
| | | | | | | | | | SLRAEDTAVYYCARDFLRWHDLWGQG | |
| | | | | | | | | | TLVTVSS | |

| | | | | | | SEQ | | SEQ | | |
|---|---|---|---|---|---|---|---|---|---|---|
| | | Heavy V | Heavy J | Light V | Light J | ID | | ID | | |
| Name | VL | Gene | Gene | Gene | Gene | NO.: | CDRH3 | NO.: | CDRL3 | Sources |
| CoV2- | EIVLTQSPGTLSLSPGERATLSCRASQS | IGHV1-58 | IGHJ3 | IGKV3-20 | IGKJ1 | 2372 | AAPHCNRTSC | 3574 | QQYGSSP | Seth Zost et al., 2020 |
| 2072 | VSSSYLGWYQQKPGQAPRLLIYGASSR | (Human) | (Human) | (Human) | (Human) | | YDAFDL | | WT | (https://www.nature.co |
| | ATGIPDRFSGSGSGTDFTLTISRLEPED | | | | | | | | | m/articles/s41591-020- |
| | FAVYYCQQYGSSPWTFGQGTKVEIK | | | | | | | | | 0998-x) |
| CoV2- | QSVLTQPPSVSGAPGQRVTLSCTGSNS | IGHV1-69 | IGHJ2 | IGLV1-40 | IGLJ3 | 2373 | ARVGVSGFKS | 3575 | QSYDSSLS | Seth Zost et al., 2020 |
| 2078 | NIGAGYDVHWYQQLPGTAPKLLIYGN | (Human) | (Human) | (Human) | (Human) | | GSNWYFDL | | DSV | (https://www.nature.co |
| | SNRPSGVPDRFSGSKSGTSASLAITGL | | | | | | | | | m/articles/s41591-020- |
| | QAEDEADYYCQSYDSSLSDSVFGGGT | | | | | | | | | 0998-x) |
| | KVTVL | | | | | | | | | |
| CoV2- | DIQLTQSPSFLSASVGDRVTITCRASQG | IGHV3-66 | IGHJ6 | IGKV1-9 | IGKJ5 | 2374 | ARDLVTYGLD | 3576 | QLLNSHPL | Seth Zost et al., 2020 |
| 2080 | ISNYLAWYQQKPGTAPNLLIYAASTLQ | (Human) | (Human) | (Human) | (Human) | | V | | T | (https://www.nature.co |
| | SGVPSRFSGSGSGTEFTLTISSLQPEDF | | | | | | | | | m/articles/s41591-020- |
| | ATYYCQLLNSHPLTFGQGTRLEIK | | | | | | | | | 0998-x) |
| CoV2- | SSELTQDPAVSVALGQTVRITCQGDSL | IGHV3-20 | IGHJ3 | IGLV3-19 | IGLJ3 | 2375 | AVIMSPIPRY | 3577 | NSRDSSGN | Seth Zost et al., 2020 |
| 2082 | RSYYASWYQQKPGQVPILVIYDKNNR | (Human) | (Human) | (Human) | (Human) | | SGYDWAGGAF | | AVV | (https://www.nature.co |
| | PSGIPDRFSGSSSGNTASLTITGAQAED | | | | | | DI | | | m/articles/s41591-020- |
| | EADYYCNSRDSSGNAVVFGGGTKLTV | | | | | | | | | 0998-x) |
| | L | | | | | | | | | |
| CoV2- | DIQMTQSPSSLSASVGDRVTITCQASQ | IGHV3-30 | IGHJ4 | IGKV1-33 | IGKJ3 | 2376 | AKNLGPYCSG | 3578 | QQYANLPF | Seth Zost et al., 2020 |
| 2083 | DISNYLNWYQQKPGKAPKLLIYDASNL | (Human) | (Human) | (Human) | (Human) | | GTCYSLVGDY | | T | (https://www.nature.co |
| | ETGVPSRFSGSGSGTDFTFTISSLQPED | | | | | | | | | m/articles/s41591-020- |
| | IATYYCQQYANLPFTFGPGTKVDIK | | | | | | | | | 0998-x) |
| CoV2- | SSELTQDPAVSVALGQTVRITCQGDSL | IGHV3-20 | IGHJ3 | IGLV3-19 | IGLJ2 | 2377 | AVIMSPIPR | 3579 | NSRDSSGN | Seth Zost et al., 2020 |
| 2094 | RSYYASWYQQKPGQVPILVIYDKNNR | (Human) | (Human) | (Human) | (Human) | | YSGYDWAGD | | AVV | (https://www.nature.co |
| | PSGIPDRFSGSSSGNTASLTITGAQAED | | | | | | AFDI | | | m/articles/s41591-020- |
| | EADYYCNSRDSSGNAVVFGGGTKLTV | | | | | | | | | 0998-x) |
| | L | | | | | | | | | |
| CoV2- | QSVLTQAPSASGTPGQRVTISCSGSNS | IGHV1-8 | IGHJ4 | IGLV1-44 | IGLJ2 | 2378 | ARMRSGWPT | 3580 | AVWDDSL | Seth Zost et al., 2020 |
| 2096 | NIGSYTINWYQQLPGTAPKLLIYGNDQ | (Human) | (Human) | (Human) | (Human) | | HGRPDDF | | NGLV | (https://www.nature.co |
| | RTSGVPDRFSGSKFGTSASLAISGLQSE | | | | | | | | | m/articles/s41591-020- |
| | DENNYYCAVWDDSLNGLVFGGGTKL | | | | | | | | | 0998-x) |
| | TVL | | | | | | | | | |
| CoV2- | DIQMTQSPSSLSASVGDRVTITCRASQ | IGHV3-9 | IGHJ6 | IGKV1-39 | IGKJ1 | 2379 | AKDIIRQGED | 3581 | QQSYSTP | Seth Zost et al., 2020 |
| 2097 | NIASYLNWYQQKPGKAPKLLIYAASSL | (Human) | (Human) | (Human) | (Human) | | GMDV | | WT | (https://www.nature.co |
| | QSGVPSRFSGSGSGTDFTLTISSLQPEE | | | | | | | | | m/articles/s41591-020- |
| | FATYYCQQSYSTPWTFGQGTKVEIK | | | | | | | | | 0998-x) |
| CoV2- | DIVMTQSPATLSVSPGERAILSCRASQ | IGHV3-23 | IGHJ3 | IGKV3-15 | IGKJ1 | 2380 | VKGLFDWFPL | 3582 | HQYNNWP | Seth Zost et al., 2020 |
| 2098 | SVRSNLAWYQQKPGQAPRLLISGAST | (Human) | (Human) | (Human) | (Human) | | | | QT | (https://www.nature.co |
| | RATAIPARFSGSGSGTEFTLTITSLQSED | | | | | | | | | m/articles/s41591-020- |
| | CAVYYCHQYNNWPQTFGQGTKVEIK | | | | | | | | | 0998-x) |
| CoV2- | NFMLTQPHSVSESPGKTVTISCTGSSG | IGHV3-7 | IGHJ4 | IGLV6-57 | IGLJ3 | 2381 | ARLGFYYGGA | 3583 | QSYDGINR | Seth Zost et al., 2020 |
| 2103 | SIASNYVQWYQQRPGSAPTTVISEDN | (Human) | (Human) | (Human) | (Human) | | DY | | AWV | (https://www.nature.co |
| | QRPSGVPDRFSGSIDSSSNSASLTISGL | | | | | | | | | m/articles/s41591-020- |
| | KTEDEADYYCQSYDGINRAWVFGGGT | | | | | | | | | 0998-x) |
| | KLTVL | | | | | | | | | |
| CoV2- | DIVMTQSPLSLPVTPGEPASISCRSSQS | IGHV3-9 | IGHJ4 | IGKV2-28 | IGKJ5 | 2382 | AKGVDYGGK | 3584 | MQALQTP | Seth Zost et al., 2020 |
| 2108 | LLHSLGYNSLSWYLQKPGQSPHLLIYL | (Human) | (Human) | (Human) | (Human) | | LAYFDS | | LT | (https://www.nature.co |
| | GSNRASGVPDRFSGSGSATDFTLKISR | | | | | | | | | m/articles/s41591-020- |
| | LEAEDVGVYYCMQALQTPLTFGQGTR | | | | | | | | | 0998-x) |
| | LEIK | | | | | | | | | |
| CoV2- | DIQMTQSPSSLSACVGDRVTITCRASQ | IGHV3-30- | IGHJ4 | IGKV1-39 | IGKJ5 | 2383 | ARDIDSGYDP | 3585 | QQSYSSL | Seth Zost et al., 2020 |
| 2110 | SISSYLNWYQQKPGKGPKLLIYAASSLQ | 3 (Human) | (Human) | (Human) | (Human) | | TPVFDY | | SIT | (https://www.nature.co |
| | SGVPSRFSGSGSGTDFTLTISSLQPEDF | | | | | | | | | m/articles/s41591-020- |
| | ATYYCQQSYSSLSITFGQGTRLEIK | | | | | | | | | 0998-x |
| CoV2- | DIQMTQSPSSLSASVGDRVTITCRASQ | IGHV3-13 | IGHJ5 | IGKV1-39 | IGKJ1 | 2384 | ARVLYDSSGF | 3586 | QQSYEIPP | Seth Zost et al., 2020 |
| 2111 | SISSYLNWYQQKPGKAPKLLIYAASSLE | (Human) | (Human) | (Human) | (Human) | | YNWFDP | | WT | (https://www.nature.co |
| | SGVPSRFSGSGSGTDFTLTISSLQPEDF | | | | | | | | | m/articles/s41591-020- |
| | ATYYCQQSYEIPPWTFGQGTKVEIK | | | | | | | | | 0998-x |
| CoV2- | DIQMTQSPSSLSASVGDRVTITCQASQ | IGHV3-53 | IGHJ5 | IGKV1-33 | IGKJ4 | 2385 | ARDFLRWHD | 3587 | QQYDNLP | Seth Zost et al., 2020 |
| 2113 | DINNYLNWYQQKPGKAPKLLIYDASN | (Human) | (Human) | (Human) | (Human) | | L | | PV | (https://www.nature.co |
| | LETGVPLRFSGSGSGTDFIFTISSLQPED | | | | | | | | | m/articles/s41591-020- |
| | IATYYCQQYDNLPPVFGGGTKVEIK | | | | | | | | | 0998-x) |

| | | | | | Not | | | | | |
|---|---|---|---|---|---|---|---|---|---|---|
| | Ab | | | Neutral- | Neutral- | | | SEQ | | SEQ |
| | or | | Doesn't | ising | ising | Protein + | | ID | | ID |
| Name | Nb | Binds to | Bind to | Vs | Vs | Epitope | Origin | NO.: | VH or VHH | NO.: |
| CoV2- | Ab | SARS-CoV2 | SARS- | | SARS-CoV1, | S; RBD | B-cells; SARS-CoV2 | 298 | QVQLVQSGAEVKKPGSSVKVSCKASGD | 1377 |
| 2114 | | | CoV1 | | SARS-CoV2 | | Human Patient | | TFSSYTINWVRQAPGQGLEWMGRIIPIL | |
| | | | | | | | | | GIPNYAQKFQGRVTITADKSTSTAFMEL | |
| | | | | | | | | | SSLRSEDTAVYYCARGRGYSNYGASYYM | |
| | | | | | | | | | DVWGKGTTVTVSS | |
| CoV2- | Ab | SARS-CoV1, | | | SARS-CoV2 | S; RBD | B-cells; SARS-CoV2 | 299 | QLQLQESGPGLVKPSETLSLTCTVSGGSI | 1378 |
| 2128 | | SARS-CoV2 | | | | | Human Patient | | SSSSYYWGWIRQPPGNGLEWIGSIYYSG | |
| | | | | | | | | | STYYNPSLKGRVSISVDTSKNQFSLKLSSV | |
| | | | | | | | | | TAADTAVYYCARILVIFTLNWFDPWGQ | |
| | | | | | | | | | GTLVTVSS | |
| CoV2- | Ab | SARS-CoV2 | SARS- | SARS-CoV2 | | S; RBD | B-cells; SARS-CoV2 | 300 | EVQLVESGGGLVKPGGSLRLSCAASGFT | 1379 |
| 2130 | | | CoV1 | | | | Human Patient | | FRDVWMSWVRQAPGKGLEWVGRIKS | |
| | | | | | | | | | KIDGGTTDYAAPVKGRFTISRDDSKNTLY | |
| | | | | | | | | | LQMNSLKTEDTAVYYCTTAGSYYYDTVG | |
| | | | | | | | | | PGLPEGKFDYWGQGTLVTVSS | |
| CoV2- | Ab | SARS-CoV2 | SARS- | SARS-CoV2 | | S; RBD | B-cells; SARS-CoV2 | 301 | EVQLVESGGGLIQPGGSLRLSCAASEVT | 1380 |
| 2132 | | | CoV1 | | | | Human Patient | | VSSNYMSWVRQAPGKGLEWVSLIYSGG | |
| | | | | | | | | | TTYYADSVKGRFTISRDNSKNTLYLQMN | |
| | | | | | | | | | SLRAEDTAVYYCARDFLRWHDLWGQG | |
| | | | | | | | | | TLVTVSS | |
| CoV2- | Ab | SARS-CoV2 | SARS- | | SARS-CoV1, | S; RBD | B-cells; SARS-CoV2 | 302 | QVQLQESGPGLVKPSETLSLTCTVSGGS | 1381 |
| 2137 | | | CoV1 | | SARS-CoV2 | | Human Patient | | VSSGSYYWSWIRQPPGKGLECIGYIYYSG | |
| | | | | | | | | | SSNYNPSLKSRVTISVDTSKNQFSLKMSS | |
| | | | | | | | | | VTAADTAVYYCAGSPVPPTIVGASYWG | |
| | | | | | | | | | QGTLVTVSS | |
| CoV2- | Ab | SARS-CoV2 | SARS- | | SARS-CoV1, | S; non- | B-cells; SARS-CoV2 | 303 | EVQLVQSGAEVKKPGESLKISCKGSGYSF | 1382 |
| 2142 | | | CoV1 | | SARS-CoV2 | RBD | Human Patient | | TSYWIDWVRQMPGKGLEWMGIIYPGD | |
| | | | | | | | | | SDTRYSPSFQGQVTISADKSTSTAYLQW | |
| | | | | | | | | | SSLKASDTAMYYCARRGEAAGIWYFDL | |
| | | | | | | | | | WGRGTLVTVSS | |
| CoV2- | Ab | SARS-CoV2 | SARS- | | SARS-CoV1, | S; non- | B-cells; SARS-CoV2 | 304 | EVQLVESGGGLVQPGGSLRLSCAASGFT | 1383 |
| 2143 | | | CoV1 | | SARS-CoV2 | RBD | Human Patient | | VSSNYMSWVRQAPGKGLEWVSVIYSA | |
| | | | | | | | | | GSTYYADSVKGRFSISRDKSKNTLYLQM | |
| | | | | | | | | | NSLRAEDTAVYYCAKEGGSGSLRYYYYG | |
| | | | | | | | | | MDVWGQGTTVTVSS | |
| CoV2- | Ab | SARS-CoV2 | SARS- | | SARS-CoV1, | S; NTD | B-cells; SARS-CoV2 | 305 | EVQLVESGGGLVQPGGSLRLSCEASGFT | 1384 |
| 2146 | | | CoV1 | | SARS-CoV2 | | Human Patient | | FSSSEINWVRQAPGKGLEWVSHISSSGSI | |
| | | | | | | | | | IYYADSVKGRFTISRDNAKNSLYLQMNSL | |
| | | | | | | | | | RAEDTAVYYCARRSYRSSWYYYYGMDV | |
| | | | | | | | | | WGQGTTVTVSS | |
| CoV2- | Ab | SARS-CoV2 | SARS- | | SARS-CoV1, | S; non- | B-cells; SARS-CoV2 | 306 | QVQLAESGGGVVQPGRSLRLSCAASGF | 1385 |
| 2147 | | | CoV1 | | SARS-CoV2 | RBD | Human Patient | | TFSSYAMHWVRQAPGKGLEWVAVISY | |
| | | | | | | | | | DGSNKYYADSVKGRFTISRDNSKNTLYL | |
| | | | | | | | | | QMNSLRAEDTAVYYCARSTSGSYYYGM | |
| | | | | | | | | | DVWGQGTTVTVSS | |
| CoV2- | Ab | SARS-CoV2 | SARS- | | SARS-CoV1, | S; NTD | B-cells; SARS-CoV2 | 307 | QVQLVESGGGVVQPGRSLRLSCAASGF | 1386 |
| 2150 | | | CoV1 | | SARS-CoV2 | | Human Patient | | TFSTYAMHWVRQAPGKGLEWVAVISY | |
| | | | | | | | | | DGSNKYYADSVKGRFTISRDNSKNTLYL | |
| | | | | | | | | | QMIGLRAEDTAVYYCARDWAPTYYDM | |
| | | | | | | | | | PSAFDIWGQGTMVTVSS | |
| CoV2- | Ab | SARS-CoV1, | | | SARS-CoV2 | S; non- | B-cells; SARS-CoV2 | 308 | QVQLVQSGAEVRKPGSSVKVSCKASGG | 1387 |
| 2151 | | SARS-CoV2 | | | | RBD | Human Patient | | TFSSYAISWVRQAPGQGLEWMGGIIPV | |
| | | | | | | | | | FGTANYAQKFQGRVTITADKSTSTAFME | |
| | | | | | | | | | LNSLRSEDTAVYYCARIGSYPEYFQHWG | |
| | | | | | | | | | QGTLVTVSS | |
| CoV2- | Ab | SARS-CoV1, | | | SARS-CoV2 | S; RBD | B-cells; SARS-CoV2 | 309 | QVQLQESGPGLVKPSQTLSLTCTVSGGSI | 1388 |
| 2158 | | SARS-CoV2 | | | | | Human Patient | | SSGGYFWSWIRQHPGKGLEWIGSIYYS | |
| | | | | | | | | | GSTYYNPSLRSRITISVDTSKNQFSLKLSS | |
| | | | | | | | | | VTAADTAVYYCARGGSGSYSLFDYWGQ | |
| | | | | | | | | | GTLVTVSS | |
| CoV2- | Ab | SARS-CoV1, | | | SARS-CoV2 | S; non- | B-cells; SARS-CoV2 | 310 | QVQLAESGGGVVQPGRSLRLSCAASGF | 1389 |
| 2159 | | SARS-CoV2 | | | | RBD | Human Patient | | TFSSYAMHWVRQAPGKGLEWVAVISY | |
| | | | | | | | | | DGSNKYYADSVKGRFTISRDNSKNTLYL | |
| | | | | | | | | | QMNSLRAEDTAVYYCARSTSGSYYYGM | |
| | | | | | | | | | DVWGQGTTVTVSS | |
| CoV2- | Ab | SARS-CoV1, | | | SARS-CoV2 | S; non- | B-cells; SARS-CoV2 | 311 | QVQLAESGGGVVQPGRSLRLSCAASGF | 1390 |
| 2160 | | SARS-CoV2 | | | | RBD | Human Patient | | TFSSYAMHWVRQAPGKGLEWVAVISY | |
| | | | | | | | | | DGSNKYYADSVKGRFTISRDNSKNTLYL | |
| | | | | | | | | | QMNSLRAEDTAVYYCARSTSGSYYYGM | |
| | | | | | | | | | DVWGQGTTVTVSS | |
| CoV2- | Ab | SARS-CoV2 | SARS- | SARS-CoV2 | | S; RBD | B-cells; SARS-CoV2 | 312 | EVQLVESGGGLVQPGGSLRLSCAASGLT | 1391 |
| 2165 | | | CoV1 | | | | Human Patient | | VRSNYMTWVRQTPGKGLEWVSVIYSG | |
| | | | | | | | | | GSTFYADSVKGRFTISRDNSKNTVYLQM | |
| | | | | | | | | | NSLRAEDTAVYYCARDLVTYGLDVWGQ | |
| | | | | | | | | | GTTVTVSS | |

| | | | | | | SEQ | | SEQ | | |
|---|---|---|---|---|---|---|---|---|---|---|
| | | Heavy V | Heavy J | Light V | Light J | ID | | ID | | |
| Name | VL | Gene | Gene | Gene | Gene | NO.: | CDRH3 | NO.: | CDRL3 | Sources |
| CoV2- | QSVLTQPPSVSGAPGQRVTISCTGSSS | IGHV1-69 | IGHJ6 | IGLV1-40 | IGLJ2 | 2386 | ARGRGYSNY | 3588 | QSYDSSLS | Seth Zost et al., 2020 |
| 2114 | NIGAGYDVHWYQQLPETAPKLLIYAN | (Human) | (Human) | (Human) | (Human) | | GASYYMDV | | GSV | (https://www.nature.co |
| | SNRPSGVPDRFSGSKSGTSASLAITGL | | | | | | | | | m/articles/s41591-020- |
| | QAEDEADYYCQSYDSSLSGSVFGGGT | | | | | | | | | 0998-x) |
| | KLTVL | | | | | | | | | |
| CoV2- | NFMLTQPHSVSESPGKTVTISCTGSSG | IGHV4-39 | IGHJ5 | IGLV6-57 | IGLJ2 | 2387 | ARILVIFTL | 3589 | QSYDSGNP | Seth Zost et al., 2020 |
| 2128 | SIASNYVQWYQQRPGSAPTTVIYEDN | (Human) | (Human) | (Human) | (Human) | | NWFDF | | | (https://www.nature.co |
| | QRPSGVPDRFSGSIDSSSNSASLTISGL | | | | | | | | | m/articles/s41591-020- |
| | KTEDEADYYCQSYDSGNPIFGGGTKLT | | | | | | | | | 0998-x |
| | VL | | | | | | | | | |
| CoV2- | DIVMTQSPDSLAVSLGERATINCKSSQ | IGHV3-15 | IGHJ4 | IGKV4-1 | IGKJ4 | 2388 | TTAGSYYYDT | 3590 | QQYYSTLT | Seth Zost et al., 2020 |
| 2130 | SVLYSSNNKNYLAWYQQKPGQPPKLL | (Human) | (Human) | (Human) | (Human) | | VGPGLPEGKF | | | (https://www.nature.co |
| | MYWASTRESGVPDRFSGSGSGAEFTL | | | | | | DY | | | m/articles/s41591-020- |
| | TISSLQAEDVAIYYCQQYYSTLTFGGGT | | | | | | | | | 0998-x) |
| | KVEIK | | | | | | | | | |
| CoV2- | DIQMTQSPSSLSASVGDRVTITCQASQ | IGHV3-53 | IGHJ5 | IGKV1-33 | IGKJ4 | 2389 | ARDFLRWHD | 3591 | QQYDNLP | Seth Zost et al., 2020 |
| 2132 | DINNYLNWYQQKPGKAPKLLIYDASN | (Human) | (Human) | (Human) | (Human) | | L | | PV | (https://www.nature.co |
| | LETGVPLRFSGSGSGTDFTFTISSLQPE | | | | | | | | | m/articles/s41591-020- |
| | DIATYYCQQYDNLPPVFGGGTKVEIK | | | | | | | | | 0998-x) |
| CoV2- | NFMLTQPHSVSESPGKTVTFSCTGSSG | IGHV4-61 | IGHJ4 | IGLV6-57 | IGLJ2 | 2390 | AGSPVPPTIV | 3592 | QSYDGINR | Seth Zost et al., 2020 |
| 2137 | SIASNYVQWYQQRPGSAPTTVIYEDN | (Human) | (Human) | (Human) | (Human) | | GASY | | WLV | (https://www.nature.co |
| | QRPSGVPDRFSGSIDSSSNSASLTISGL | | | | | | | | | m/articles/s41591-020- |
| | KTEDEADYYCQSYDGINRWLVFGGGT | | | | | | | | | 0998-x) |
| | KLTVL | | | | | | | | | |
| CoV2- | QPVLTQPPSASASLGASVTLTCTLSSGY | IGHV5-51 | IGHJ2 | IGLV9-49 | IGLJ2 | 2391 | ARRGEAAGI | 3593 | GADHGSG | Seth Zost et al., 2020 |
| 2142 | SNYKVDWYQQRPGKGPRFVMRVGT | (Human) | (Human) | (Human) | (Human) | | WYFDL | | SNFEYVV | (https://www.nature.co |
| | GGIVGSKGDGIPDRFSVLGSGLNRYLTI | | | | | | | | | m/articles/s41591-020- |
| | KNIQEEDESDYHCGADHGSGSNFEYV | | | | | | | | | 0998-x) |
| | VFGGGTKLTVL | | | | | | | | | |
| CoV2- | QSVVTQPPSASGTPGQRVTISCSGSSS | IGHV3-66 | IGHJ6 | IGLV1-44 | IGLJ1 | 2392 | AKEGGSGSLR | 3594 | AAWDDSL | Seth Zost et al., 2020 |
| 2143 | NIGYNIVNWYQQLPGTAPKLLIYSNN | (Human) | (Human) | (Human) | (Human) | | YYYYGMDV | | NGYV | (https://www.nature.co |
| | QRPSGVPDRFSGSKSGTSASLSISGLQS | | | | | | | | | m/articles/s41591-020- |
| | EDEADYYCAAWDDSLNGYVFGTGTK | | | | | | | | | 0998-x) |
| | VTVL | | | | | | | | | |
| CoV2- | DIQLTQSPSFLSASVGDRVTITCRASQG | IGHV3-48 | IGHJ6 | IGKV1-9 | IGKJ1 | 2393 | ARRSYRSSWY | 3595 | QQLNSYPV | Seth Zost et al., 2020 |
| 2146 | ISSYLAWYQQKPGKAPKLLIYAASTLQS | (Human) | (Human) | (Human) | (Human) | | YYYGMDV | | T | (https://www.nature.co |
| | GVPSRFSGSGSGTEFTLTISSLQPEDFA | | | | | | | | | m/articles/s41591-020- |
| | TYYCQQLNSYPVTFGQGTKVEIK | | | | | | | | | 0998-x) |
| CoV2- | QSALTQPASVSGSPGQSITISCTGTSSD | IGHV3-30- | IGHJ6 | IGLV2-14 | IGLJ1 | 2394 | ARSTSGSYYY | 3596 | SSYTSSST | Seth Zost et al., 2020 |
| 2147 | VGDYNYVSWYQQHPGKAPKLMIYDV | 3 | (Human) | (Human) | (Human) | | GMDV | | LYV | (https://www.nature.co |
| | SNRPSGVSNRFSGSKSGNTASLTISGL | (Human) | | | | | | | | m/articles/s41591-020- |
| | QAEDEAEYYCSSYTSSSTLLYVFGTGTK | | | | | | | | | 0998-x) |
| | VTVL | | | | | | | | | |
| CoV2- | SYVLTQPPSVSVAPGKTARITCGGNNI | IGHV3-30- | IGHJ3 | IGLV3-21 | IGLJ3 | 2395 | ARDWAPTYY | 3597 | QVWDSSS | Seth Zost et al., 2020 |
| 2150 | GNKGVHWYQQKPGQAPVLVVDDDS | 3 | (Human) | (Human) | (Human) | | DMPSAFDI | | DHPGV | (https://www.nature.co |
| | DRPSGIPERFSGSNSGNTATLIISSVEV | (Human) | | | | | | | | m/articles/s41591-020- |
| | GDEADFYCQVWDSSSDHPGVFGGGT | | | | | | | | | 0998-x) |
| | KLTVL | | | | | | | | | |
| CoV2- | EIVLTQSPATLSLSPGERATLSCRASQS | IGHV1-69 | IGHJ1 | IGKV3-11 | IGKJ4 | 2396 | ARIGSYPEY | 3598 | HYRSNWP | Seth Zost et al., 2020 |
| 2151 | VSSFLAWYQQKPGQAPRLLIYDASNR | (Human) | (Human) | (Human) | (Human) | | FQH | | PVLT | (https://www.nature.co |
| | ATGIPARFSGSGSGTDFTLTISSLEPEDF | | | | | | | | | m/articles/s41591-020- |
| | AVYYCHYRSNWPPVLTFGGGTKVEIE | | | | | | | | | 0998-x) |
| CoV2- | DIQMTQSPSSLSASVGDRVTITCQASQ | IGHV4-31 | IGHJ4 | IGKV1-33 | IGKJ2 | 2397 | ARGGSGSYSL | 3599 | QQYDNLYS | Seth Zost et al., 2020 |
| 2158 | DITNYLNWYQQKPGKAPKLLIYDASNL | (Human) | (Human) | (Human) | (Human) | | FDY | | VH | (https://www.nature.co |
| | ETGVPSRFSGSGSGTDFTFTISSLQPED | | | | | | | | | m/articles/s41591-020- |
| | FATYYCQQYDNLYSVHFGQGTKLEIK | | | | | | | | | 0998-x) |
| CoV2- | QSALTQPASVSGSPGQSITISCTGTSSD | IGHV3-30- | IGHJ6 | IGLV2-14 | IGLJ1 | 2398 | ARSTSGSYYY | 3600 | SSYTSSST | Seth Zost et al., 2020 |
| 2159 | VGDYNYVSWYQQHPGKAPKLMIYDV | 3 | (Human) | (Human) | (Human) | | GMDV | | LYV | (https://www.nature.co |
| | SNRPSGVSNRFSGSKSGNTASLTISGL | (Human) | | | | | | | | m/articles/s41591-020- |
| | QAEDEAEYYCSSYTSSSTLLYVFGTGTK | | | | | | | | | 0998-x) |
| | VTVL | | | | | | | | | |
| CoV2- | QSALTQPASVSGSPGQSITISCTGTSSD | IGHV3-30- | IGHJ6 | IGLV2-14 | IGLJ1 | 2399 | ARSTSGSYYY | 3601 | SSYTSSST | Seth Zost et al., 2020 |
| 2160 | VGDYNYVSWYQQHPGKAPKLMIYDV | 3 | (Human) | (Human) | (Human) | | GMDV | | LYV | (https://www.nature.co |
| | SNRPSGVSNRFSGSKSGNTASLTISGL | (Human) | | | | | | | | m/articles/s41591-020- |
| | QAEDEAEYYCSSYTSSSTLLYVFGTGTK | | | | | | | | | 0998-x) |
| | VTVL | | | | | | | | | |
| CoV2- | DIQLTQSPSFLSASVGDRVTITCRASQG | IGHV3-66 | IGHJ6 | IGKV1-9 | IGKJ5 | 2400 | ARDLVTYGLD | 3602 | QLLNSHPL | Seth Zost et al., 2020 |
| 2165 | ISNYLAWYQQKPGTAPNLLIYAASTLQ | (Human) | (Human) | (Human) | (Human) | | V | | T | (https://www.nature.co |
| | SGVPSRFSGSGSGTEFTLTISSLQPEDF | | | | | | | | | m/articles/s41591-020- |
| | ATYYCQLLNSHPLTFGQGTRLEIK | | | | | | | | | 0998-x) |

| | | | | | Not | | | | | |
|---|---|---|---|---|---|---|---|---|---|---|
| | Ab | | | Neutral- | Neutral- | | | SEQ | | SEQ |
| | or | | Doesn't | ising | ising | Protein + | | ID | | ID |
| Name | Nb | Binds to | Bind to | Vs | Vs | Epitope | Origin | NO.: | VH or VHH | NO.: |
| CoV2- | Ab | SARS-CoV1, | | | SARS-CoV2 | S; non- | B-cells; SARS-CoV2 | 313 | QVQLVQSGAEVKKPGSSVKVSCKASGG | 1392 |
| 2166 | | SARS-CoV2 | | | | RBD | Human Patient | | TFSSYAIIWVRQAPGQGLEWMGGIIPIF | |
| | | | | | | | | | GTTNYAQKFQGRVTITADESTSTAYVELS | |
| | | | | | | | | | SLRSEDTAVYYCARIGHFDSSGYYLDYW | |
| | | | | | | | | | GQGTLVTVSS | |
| CoV2- | Ab | SARS-CoV1, | | | SARS-CoV2 | S; non- | B-cells; SARS-CoV2 | 314 | EVQLVESGGGLVQPGGSLRLSCVASGFT | 1393 |
| 2171 | | SARS-CoV2 | | | | RBD | Human Patient | | FSFYWMSWVRQAPGKGLEWVANIKQ | |
| | | | | | | | | | DGGEKYYVDSVKGRFTISRDNAKNSLYL | |
| | | | | | | | | | QMNSLRAEDTAVYYCARLSGSSWDFDY | |
| | | | | | | | | | WGQGTLVTVSS | |
| CoV2- | Ab | SARS-CoV2 | SARS- | | SARS-CoV1, | S; non- | B-cells; SARS-CoV2 | 315 | EVQLVESGGGVVRPGGSLRLSCAASGFT | 1394 |
| 2173 | | | CoV1 | | SARS-CoV2 | RBD | Human Patient | | FDDYGMSWVRQAPGKGLEWVSAINW | |
| | | | | | | | | | NGGSTGYADSVKGRFTISRDNAKNSLYL | |
| | | | | | | | | | QMNSLRAEDTALYHCARRRSSSRYSSG | |
| | | | | | | | | | WYMYYYYMDVWGKGTTVTVSS | |
| CoV2- | Ab | SARS-CoV1, | | | SARS-CoV2 | S; non- | B-cells; SARS-CoV2 | 316 | EVQLVESGGGLVQPGGSLRLSCVASGFT | 1395 |
| 2175 | | SARS-CoV2 | | | | RBD | Human Patient | | FSFYWMSWVRQAPGKGLEWVANIKQ | |
| | | | | | | | | | DGGEKYYVDSVKGRFTISRDNAKNSLYL | |
| | | | | | | | | | QMNSLRAEDTAVYYCARLSGSSWDFDY | |
| | | | | | | | | | WGQGTLVTVSS | |
| CoV2- | Ab | SARS-CoV2 | SARS- | | SARS-CoV1, | S; non- | B-cells; SARS-CoV2 | 317 | QITFKESGPTLVKPTETLTLTCTFSGFSVS | 1396 |
| 2177 | | | CoV1 | | SARS-CoV2 | RBD | Human Patient | | TSGEGVGWIRQPPGKALEWLAVIYWD | |
| | | | | | | | | | DDKRYSPSLKSRLTITRDTSKNQVVLTMT | |
| | | | | | | | | | NMDPVDTATYYCAHRLWFRDAFDIWG | |
| | | | | | | | | | QGTTVTVSS | |
| CoV2- | Ab | SARS-CoV1, | | | SARS-CoV2 | S; non- | B-cells; SARS-CoV2 | 318 | EVQLVESGGGLVQPGGSLRLSCAASGFT | 1397 |
| 2178 | | SARS-CoV2 | | | | RBD | Human Patient | | FSTYWMTWVRQAPGKGLEWVANIKQ | |
| | | | | | | | | | DGSEKYYVDSVKYRFTISRDNAKNSLYLQ | |
| | | | | | | | | | MNSLRAEDTAVYYCARVGSSSWYFDYW | |
| | | | | | | | | | GQGTLVTVSS | |
| CoV2- | Ab | SARS-CoV1, | | | SARS-CoV2 | S; non- | B-cells; SARS-CoV2 | 319 | QVQLVESGGGVVQPGRSLRLSCAASGF | 1398 |
| 2183 | | SARS-CoV2 | | | | RBD | Human Patient | | TFSSYAMHWVRQAPGKGLEWVAGISY | |
| | | | | | | | | | DGSNKYYADSVKGRFTISRDNSKNTLYL | |
| | | | | | | | | | QMNSLRAEDTAVYYCARADTMVRGTYF | |
| | | | | | | | | | EYWGQGTLVTVSS | |
| CoV2- | Ab | SARS-CoV1, | | | SARS-CoV2 | S; non- | B-cells; SARS-CoV2 | 320 | QVQLVESGGGVVQPGRSLRLSCAASGF | 1399 |
| 2187 | | SARS-CoV2 | | | | RBD | Human Patient | | TFSYYPMHWLWVRQAPGKGLEWVAVT | |
| | | | | | | | | | SYDGTNKYYADSVKGRFTISRDNSKNTLY | |
| | | | | | | | | | LQMNSLRAEDTAVYYCARGGATNFDY | |
| | | | | | | | | | WGQGTLVTVSS | |
| CoV2- | Ab | SARS-CoV1, | | | SARS-CoV2 | S; non- | B-cells; SARS-CoV2 | 321 | EAQLVESGGGLVQPGRSLRLSCAASGFT | 1400 |
| 2189 | | SARS-CoV2 | | | | RBD | Human Patient | | FDDSAMHWVRQAPGKGLEWVSGISW | |
| | | | | | | | | | NSGNVGYADSVKGRFTISRDNAKNSLYL | |
| | | | | | | | | | QMNSLRAEDTALYYCTKASRYCSSTICY | |
| | | | | | | | | | WNWFDPWGQGTLVTVSS | |
| CoV2- | Ab | SARS-CoV2 | SARS- | | SARS-CoV1, | S; NTD | B-cells; SARS-CoV2 | 322 | EVQLVESGGGLVQPGGSLRLSCAASGFT | 1401 |
| 2190 | | | CoV1 | | SARS-CoV2 | | Human Patient | | FSSYEMNWVRQAPGKGLEWVSYISSSG | |
| | | | | | | | | | SAIYYADSVKGRFTISRDNAKNSLYLQM | |
| | | | | | | | | | NSLRVEDTAVYYCAREARSRYFDWLPSY | |
| | | | | | | | | | YFDYWGQGTLVTVSS | |
| CoV2- | Ab | SARS-CoV2 | SARS- | | SARS-CoV1, | S; non- | B-cells; SARS-CoV2 | 323 | EVQLVESGGGVVRPGGSLRLSCAASGFT | 1402 |
| 2191 | | | CoV1 | | SARS-CoV2 | RBD | Human Patient | | FDDYGMSWVRQAPGKGLEWVSAINW | |
| | | | | | | | | | NGGSTGYADSVKGRFTISRDNAKNSLYL | |
| | | | | | | | | | QMNSLRAEDTALYHCARRRSSSRYSSG | |
| | | | | | | | | | WYMYYYYMDVWGKGTTVTVSS | |
| CoV2- | Ab | SARS-CoV2 | SARS- | | SARS-CoV1, | S; non- | B-cells; SARS-CoV2 | 324 | QVHLVESGGGVVQPGRSLRLSCAASGF | 1403 |
| 2195 | | | CoV1 | | SARS-CoV2 | RBD | Human Patient | | TFSNYGMHWVRQAPGKGLEWVAVISN | |
| | | | | | | | | | DEFNKFYANSVKGRFTISRDNSKNTVYL | |
| | | | | | | | | | QLNSLRTEDTARYYCAKGGDGSGWAW | |
| | | | | | | | | | DGDNPPTDYWGQGTLVIVSS | |
| CoV2- | Ab | SARS-CoV2 | SARS- | SARS-CoV2 | | S; RBD | B-cells; SARS-CoV2 | 325 | QMQLVQSGPEVKKPGTSVKVSCKASGF | 1404 |
| 2196 | | | CoV1 | | | | Human Patient | | TFMSSAVQWVRQARGQRLEWIGWIVI | |
| | | | | | | | | | GSGNTNYAQKFQERVTITRDMSTSTAY | |
| | | | | | | | | | MELSSLRSEDTAVYYCAAPYCSSISCNDG | |
| | | | | | | | | | FDIWGQGTMVTVSS | |
| CoV2- | Ab | SARS-CoV2 | SARS- | | SARS-CoV1, | S; non- | B-cells; SARS-CoV2 | 326 | EVQLVQSGAEVKKPGESLKISCKGSGYSF | 1405 |
| 2197 | | | CoV1 | | SARS-CoV2 | RBD | Human Patient | | TSYWIGWVRQMPGKGLEWMGIIYPGD | |
| | | | | | | | | | SDTRYSPSFQGQVTISADKSISTAYLQWS | |
| | | | | | | | | | SLKASDTAMYYCARPDYSSGWFSYWYF | |
| | | | | | | | | | DLWGRGTLVTVSS | |

| | | | | | | SEQ | | SEQ | | |
|---|---|---|---|---|---|---|---|---|---|---|
| | | Heavy V | Heavy J | Light V | Light J | ID | | ID | | |
| Name | VL | Gene | Gene | Gene | Gene | NO.: | CDRH3 | NO.: | CDRL3 | Sources |
| CoV2- | EIVLTQSPATLSLSPGERATLSCRASQS | IGHV1-69 | IGHJ4 | IGKV3-11 | IGKJ3 | 2401 | ARIGHFDSSG | 3603 | QHRTNWP | Seth Zost et al., 2020 |
| 2166 | VSSFLAWYQQKPGQAPRLLIYDASNR | (Human) | (Human) | (Human) | (Human) | | YYLDY | | PLFT | (https://www.nature.co |
| | PTGIPARFTGSGSGTDFTLTISSLEPEDF | | | | | | | | | m/articles/s41591-020- |
| | AVYYCQHRTNWPPLFTFGPGTKVDIK | | | | | | | | | 0998-x) |
| CoV2- | SYELTQPPSVSVSPGQTASITCSGDKLG | IGHV3-7 | IGHJ4 | IGLV3-1 | IGLJ1 | 2402 | ARLSGSSWDF | 3604 | QAWDSST | Seth Zost et al., 2020 |
| 2171 | DKYACWYQQRPGQSPVLVIYQDSKRP | (Human) | (Human) | (Human) | (Human) | | DY | | GV | (https://www.nature.co |
| | SGIPERFSGSNSGNTATLTISGTQAMD | | | | | | | | | m/articles/s41591-020- |
| | EADYYCQAWDSSTGVFGTGTKVTVL | | | | | | | | | 0998-x) |
| CoV2- | DIQMTQSPSTLSASVGDRVTITCRASQ | IGHV3-20 | IGHJ6 | IGKV1-5 | IGKJ1 | 2403 | ARRRSSSRYS | 3605 | QQYNTYSG | Seth Zost et al., 2020 |
| 2173 | SVSTWLAWYQQKPGKAPNLLIYEASSL | (Human) | (Human) | (Human) | (Human) | | SGWYMYYYY | | T | (https://www.nature.co |
| | ESGVPSRFSGSGSGTEFTLTISSLQPDD | | | | | | MDV | | | m/articles/s41591-020- |
| | FATYYCQQYNTYSGTFGQGTKVEIK | | | | | | | | | 0998-x) |
| CoV2- | SYELTQPPSVSVSPGQTASITCSGDKLG | IGHV3-7 | IGHJ4 | IGLV3-1 | IGLJ1 | 2404 | ARLSGSSWDF | 3606 | QAWDSST | Seth Zost et al., 2020 |
| 2175 | DKYACWYQQRPGQSPVLVIYQDSKRP | (Human) | (Human) | (Human) | (Human) | | DY | | GV | (https://www.nature.co |
| | SGIPERFSGSNSGNTATLTISGTQAMD | | | | | | | | | m/articles/s41591-020- |
| | EADYYCQAWDSSTGVFGTGTKVTVL | | | | | | | | | 0998-x) |
| CoV2- | DIQMTQSPSSLSASVGDRVTITCRARQ | IGHV2-5 | IGHJ3 | IGKV1-39 | IGKJ1 | 2405 | AHRLWFRDA | 3607 | QQTYSTF | Seth Zost et al., 2020 |
| 2177 | SISNYLNWYQQKPGKAPKLLIYAASSL | (Human) | (Human) | (Human) | (Human) | | FDI | | WT | (https://www.nature.co |
| | HSGVPSRFSGSGSGTDFTLTISSLQPED | | | | | | | | | m/articles/s41591-020- |
| | FATYYCQQTYSTFWTFGQGTNVEIK | | | | | | | | | 0998-x) |
| CoV2- | SYELTQPPSVSVSPGQTASITCSGDKLG | IGHV3-7 | IGHJ4 | IGLV3-1 | IGLJ2 | 2406 | ARVGSSSWYF | 3608 | QAWDSST | Seth Zost et al., 2020 |
| 2178 | DKYACWYQQKPGQSPVVVIYQDSKR | (Human) | (Human) | (Human) | (Human) | | DY | | AV | (https://www.nature.co |
| | PSGIPERFSGSNSGNTATLTISGTQAM | | | | | | | | | m/articles/s41591-020- |
| | DEADYYCQAWDSSTAVFGGGTKLTVL | | | | | | | | | 0998-x) |
| CoV2- | QSALTQPASVSGSPGQSITISCTGTSSD | IGHV3-30- | IGHJ4 | IGLV2-14 | IGLJ2 | 2407 | ARADTMVRG | 3609 | SSYTSSR | Seth Zost et al., 2020 |
| 2183 | VGGYNYVSWYQQHPGKAPKLMIYDV | 3 | (Human) | (Human) | (Human) | | TYFEY | | AVL | (https://www.nature.co |
| | SNRPSGVSNRFSGSKSGNTASLTISGL | (Human) | | | | | | | | m/articles/s41591-020- |
| | QAEDEADYCCSSYTSSRAVLFGGGTKL | | | | | | | | | 0998-x) |
| | TVL | | | | | | | | | |
| CoV2- | SYVLTQPPSVSVAPGKTANITCGGNNI | IGHV3-30- | IGHJ4 | IGLV3-21 | IGLJ3 | 2408 | ARGGATNFD | 3610 | QVWDSSS | Seth Zost et al., 2020 |
| 2187 | GRKSVHWYQQKSGQAPVLVVYDDSD | 3 | (Human) | (Human) | (Human) | | Y | | DHPEWV | (https://www.nature.co |
| | RPSGIPERFSGSNSGNTATLTISRVEAG | (Human) | | | | | | | | m/articles/s41591-020- |
| | DEADYYCQVWDSSSDHPEWVFGGGT | | | | | | | | | 0998-x) |
| | KLTVL | | | | | | | | | |
| CoV2- | DIQMTQSPSSLSASVGDRVTITCRASQ | IGHV3-9 | IGHJ5 | IGKV1-39 | IGKJ4 | 2409 | TKASRYCSST | 3611 | QQSYSTPT | Seth Zost et al., 2020 |
| 2189 | SISSYLNWYQQKPGKAPKLLIYGASSLQ | (Human) | (Human) | (Human) | (Human) | | ICYWNWFDP | | | (https://www.nature.co |
| | TGVPSRFSGSGSGTDFTLTIRSLQPEDF | | | | | | | | | m/articles/s41591-020- |
| | ASYYCQQSYSTPTFGGGTKVEIK | | | | | | | | | 0998-x) |
| CoV2- | QSALTQPASVSGSPGQSITISCTGTSSD | IGHV3-48 | IGHJ4 | IGLV2-14 | IGLJ2 | 2410 | AREARSRYFD | 3612 | SSYTSSST | Seth Zost et al., 2020 |
| 2190 | IGGYNYVSWYQQHPGKAPKLLIYDVS | (Human) | (Human) | (Human) | (Human) | | WLPSYYFDY | | HVV | (https://www.nature.co |
| | NRPSGVSTRFSGSKSGNTASLTISGLQ | | | | | | | | | m/articles/s41591-020- |
| | AEDEADYYCSSYTSSSTHVVFGGGTKL | | | | | | | | | 0998-x) |
| | TVL | | | | | | | | | |
| CoV2- | DIQMTQSPSTLSASVGDRVTITCRASQ | IGHV3-20 | IGHJ6 | IGKV1-5 | IGKJ1 | 2411 | ARRRSSSRYS | 3613 | QQYNTYSG | Seth Zost et al., 2020 |
| 2191 | SVSTWLAWYQQKPGKAPNLLIYEASSL | (Human) | (Human) | (Human) | (Human) | | SGWYMYYYY | | T | (https://www.nature.co |
| | ESGVPSRFSGSGSGTEFTLTISSLQPDD | | | | | | MDV | | | m/articles/s41591-020- |
| | FATYYCQQYNTYSGTFGQGTKVEIK | | | | | | | | | 0998-x) |
| CoV2- | DIVMTQSPDFLAVSLGERATISCKSSQS | IGHV3-30 | IGHJ4 | IGKV4-1 | IGKJ4 | 2412 | AKGGDGSG | 3614 | QQYYTAPL | Seth Zost et al., 2020 |
| 2195 | VLYTPKNKNYLAWYKQKPGQPPKVLIY | (Human) | (Human) | (Human) | (Human) | | WAWDGDNP | | T | (https://www.nature.co |
| | WASTRESGVPDRFSGSGSGTDFTLIISS | | | | | | PTDY | | | m/articles/s41591-020- |
| | LQAEDAAVYYCQQYYTAPLTFGGGTR | | | | | | | | | 0998-x) |
| | VEIK | | | | | | | | | |
| CoV2- | EIVLTQSPGTLSLSPGERATLSCRASQS | IGHV1-58 | IGHJ3 | IGKV3-20 | IGKJ1 | 2413 | AAPYCSSIS | 3615 | QHYGSSRG | Seth Zost et al., 2020 |
| 2196 | VSSSYLAWYQQKPGQAPRLLIYGASSR | (Human) | (Human) | (Human) | (Human) | | CNDGFDI | | WT | (https://www.nature.co |
| | ATGIPDRFSGSGSGTDFTLTISRLEPED | | | | | | | | | m/articles/s41591-020- |
| | FAVYYCQHYGSSRGWTFGQGTKVEIK | | | | | | | | | 0998-x) |
| CoV2- | EIVLTQSPGTLSLSPGERATLSCRASQS | IGHV5-51 | IGHJ2 | IGKV3-20 | IGKJ5 | 2414 | ARPDYSSGW | 3616 | QQYGRSPI | Seth Zost et al., 2020 |
| 2197 | VSSNFLAWYQQKPGQAPRLLIYGASS | (Human) | (Human) | (Human) | (Human) | | FSYWYFDL | | T | (https://www.nature.co |
| | RATGIPDRFSGSGSGTDFTLTISRLEPE | | | | | | | | | m/articles/s41591-020- |
| | DFAVYYCQQYGRSPITFGQGTRLEIK | | | | | | | | | 0998-x) |

| | | | | | Not | | | | | |
|---|---|---|---|---|---|---|---|---|---|---|
| | Ab | | | Neutral- | Neutral- | | | SEQ | | SEQ |
| | or | | Doesn't | ising | ising | Protein + | | ID | | ID |
| Name | Nb | Binds to | Bind to | Vs | Vs | Epitope | Origin | NO.: | VH or VHH | NO.: |
| CoV2- | Ab | SARS-CoV2 | SARS- | | SARS-CoV1, | S; NTD | B-cells; SARS-CoV2 | 327 | QVQLVQSGAEVKKPGASVKVSCKVSGY | 1406 |
| 2199 | | | CoV1 | | SARS-CoV2 | | Human Patient | | TLTELSIHWVRQAPGKGLEWMGGFDP | |
| | | | | | | | | | EDAETIYAQQFQGRVTMTEDTSTDTAY | |
| | | | | | | | | | MELSSLKSEDTALYYCATGFAVFGRAAV | |
| | | | | | | | | | PYWGQGTLVTVSS | |
| CoV2- | Ab | SARS-CoV1, | | | SARS-CoV2 | S; non- | B-cells; SARS-CoV2 | 328 | QVQLVESGGGVVQPGRSLRLSCAASGF | 1407 |
| 2203 | | SARS-CoV2 | | | | RBD | Human Patient | | TFSTYAMHWVRQAPGKGLAWVALISYD | |
| | | | | | | | | | GYNKYYADSVRGRFTISRINSKNTLSLQM | |
| | | | | | | | | | NSLRAEDTAVYYCARGSAGNYYYGMDV | |
| | | | | | | | | | WGQGTTVTVSS | |
| CoV2- | Ab | SARS-CoV2 | SARS- | | SARS-CoV1, | S; non- | B-cells; SARS-CoV2 | 329 | EVQLVQSGAEVKKPGESLKISCKGSGYSF | 1408 |
| 2207 | | | CoV1 | | SARS-CoV2 | RBD | Human Patient | | TSHWIGWVRQMPGKGLEWMGIIYPG | |
| | | | | | | | | | DSDTRYSPSFQGQVTISADKSISTAYLQW | |
| | | | | | | | | | SSLKASDTAMYYCASALRERGVQLWSV | |
| | | | | | | | | | WGQGTLVTVSS | |
| CoV2- | Ab | SARS-CoV2 | SARS- | | SARS-CoV1, | S; NTD | B-cells; SARS-CoV2 | 330 | QVQLVESGGGVVQPGRSLRLSCAASGF | 1409 |
| 2210 | | | CoV1 | | SARS-CoV2 | | Human Patient | | TFSSYAMHWVRQAPGKGLEWVAVISY | |
| | | | | | | | | | DGSNKYYADSVKGRFTISRDNSKNTLYL | |
| | | | | | | | | | QMNSLRVEDTAVYYCARDQEWFRELFL | |
| | | | | | | | | | FDYWGQGTLVTVSS | |
| CoV2- | Ab | SARS-CoV2 | SARS- | | SARS-CoV1, | S; NTD | B-cells; SARS-CoV2 | 331 | EVQLVESGGGLVKPGGSLRLSCAASGFT | 1410 |
| 2212 | | | CoV1 | | SARS-CoV2 | | Human Patient | | FSSYSMNWVRQAPGKGLEWVSSISNSN | |
| | | | | | | | | | SFIYYADSMKGRFTISRDNAKNSLYLQM | |
| | | | | | | | | | NSLRAEDTAVYYCARVNGNSNWNFGSY | |
| | | | | | | | | | YYYYMDVWGKGTTVTVSS | |
| CoV2- | Ab | SARS-CoV1, | | | SARS-CoV2 | S; non- | B-cells; SARS-CoV2 | 332 | QVQLVQSGAEVKKPGSSVKVSCKASGG | 1411 |
| 2214 | | SARS-CoV2 | | | | RBD | Human Patient | | TFSSYAIIWVRQAPGQGLEWMGGIIPIF | |
| | | | | | | | | | GTTNYAQKFQGRVTITADESTSTAYVELS | |
| | | | | | | | | | SLRSEDTAVYYCARIGHFDSSGYYLDYW | |
| | | | | | | | | | GQGTLVTVSS | |
| CoV2- | Ab | SARS-CoV2 | SARS- | | SARS-CoV1, | S; NTD | B-cells; SARS-CoV2 | 333 | EVQLVESGGGLVKPGGSLRLSCAASGFT | 1412 |
| 2215 | | | CoV1 | | SARS-CoV2 | | Human Patient | | FSGYSMNWVRQAPGKGLEWVSSISSSS | |
| | | | | | | | | | SYIYYADSVKGRFTISRDNAKNSLYLQMN | |
| | | | | | | | | | SLRAEDTAVYYCARWLQLRSDYYYFGM | |
| | | | | | | | | | DVWGQGTTVTVSS | |
| CoV2- | Ab | SARS-CoV1, | | | SARS-CoV2 | S; non- | B-cells; SARS-CoV2 | 334 | QVQLVQSGAEVKKPGSSVKVSCKASGG | 1413 |
| 2216 | | SARS-CoV2 | | | | RBD | Human Patient | | TFSSYAISWVRQAPGQGLEWMGGIIPIF | |
| | | | | | | | | | GAANYAQNFQGRVTITADESTSTGYMQ | |
| | | | | | | | | | LSSLRFEDTAVYYCARTSHYDSSGSYFEY | |
| | | | | | | | | | WGQGTLVTVSS | |
| CoV2- | Ab | SARS-CoV1, | | | SARS-CoV2 | S; non- | B-cells; SARS-CoV2 | 335 | QVQLVESGGGVVQPGRSLRLSCAASGF | 1414 |
| 2218 | | SARS-CoV2 | | | | RBD | Human Patient | | TFSSYALFWVRQAPGKGLEWVAVISYD | |
| | | | | | | | | | GNNKYYADSVRGRFTISRDNSKNTLYLQ | |
| | | | | | | | | | MNSLRPEDTAVYYCARPYTGSYKSYMD | |
| | | | | | | | | | VWGKGTTVTVSS | |
| CoV2- | Ab | SARS-CoV2 | SARS- | | SARS-CoV1, | S; NTD | B-cells; SARS-CoV2 | 336 | QVQLQESGPGLVKPSETLSLTCTVSGGSI | 1415 |
| 2222 | | | CoV1 | | SARS-CoV2 | | Human Patient | | SSYYWSWIRQPPGKGLEWIGYIYYSGST | |
| | | | | | | | | | NYNPSLKSRVTISVDMSKNQFSLKLRSVT | |
| | | | | | | | | | AADTAVYYCARAPRERLQWGEYYFDYW | |
| | | | | | | | | | GQGTLVTVSS | |
| CoV2- | Ab | SARS-CoV1, | | | SARS-CoV2 | S; non- | B-cells; SARS-CoV2 | 337 | QVQLVESGGGVVQPGRSLRLSCAASGF | 1416 |
| 2224 | | SARS-CoV2 | | | | RBD | Human Patient | | TFSTYGMHWVRQAPGKGLEWVAVISY | |
| | | | | | | | | | DGSNKYYADSVKGRFTISRDNSKNTLYL | |
| | | | | | | | | | QMNSLRAEDTAMYYCAKDGSIAAADY | |
| | | | | | | | | | WGQGTLVTVSS | |
| CoV2- | Ab | SARS-CoV2 | SARS- | | SARS-CoV1, | S; non- | B-cells; SARS-CoV2 | 338 | EVQLVQSGAEVKKPGESLKISCKGSGYSF | 1417 |
| 2226 | | | CoV1 | | SARS-CoV2 | RBD | Human Patient | | TNSWIGWVRQMPGKGLEWMGIIYPG | |
| | | | | | | | | | DSDTRYSPSFQGQVTISADKSISTAYLQW | |
| | | | | | | | | | SSLKASDTAIYYCATHRCSGGFCYLAYWG | |
| | | | | | | | | | QGTLVTVSS | |
| CoV2- | Ab | SARS-Cov1, | | | SARS-CoV2 | S; non- | B-cells; SARS-CoV2 | 339 | QVQLVESGGGVVQPGRSLRLSCAASGF | 1418 |
| 2227 | | SARS-CoV2 | | | | RBD | Human Patient | | TFSSYGMHWVRQAPGKGLEWVAVIWY | |
| | | | | | | | | | DGSKKDYADSVKGRFTISRDNSKNTLYL | |
| | | | | | | | | | QMNSLRAEDTAVYYCARDQSQGAYILT | |
| | | | | | | | | | GYRGYGMDVWGQGTTVTVSS | |
| CoV2- | Ab | SARS-CoV2 | SARS- | | SARS-CoV1, | S; NTD | B-cells; SARS-CoV2 | 340 | QVQLQQWGAGLLKPSETLSLTCAVYGG | 1419 |
| 2228 | | | CoV1 | | SARS-CoV2 | | Human Patient | | SFSGHYWSWIRQPPGKGLEWIGEINHS | |
| | | | | | | | | | GSTNYNPSLKSRVTISVDTSKNQFSLKLSS | |
| | | | | | | | | | VTAADTAVYYCARPPQAARIHYYYYMD | |
| | | | | | | | | | VWGKGTTVTVSS | |
| CoV2- | Ab | SARS-CoV1, | | | SARS-CoV2 | S; RBD | B-cells; SARS-CoV2 | 34 | EVQLVESGGGLVQPGRSLRLSCAASGFT | 1420 |
| 2231 | | SARS-CoV2 | | | | | Human Patient | | FDDYAMNWVRQPPGKGLEWVSGISW | |
| | | | | | | | | | NSDSIGYADSVKGRFTISRDNAKNSLYLQ | |
| | | | | | | | | | MNSLRAEDTAMYYCAKGRGAGYTSYM | |
| | | | | | | | | | DVWGKGTTVTVSS | |

| | | | | | | SEQ | | SEQ | | |
|---|---|---|---|---|---|---|---|---|---|---|
| | | Heavy V | Heavy J | Light V | Light J | ID | | ID | | |
| Name | VL | Gene | Gene | Gene | Gene | NO.: | CDRH3 | NO.: | CDRL3 | Sources |
| CoV2- | SYELTQPPSVSVSPGQTASITCFGDKLG | IGHV1-24 | IGHJ4 | IGLV3-1 | IGLJ2 | 2415 | ATGFAVFGRA | 3617 | QAWDSST | Seth Zost et al., 2020 |
| 2199 | DKYACWFQQKPGQSPVLIIYQGAKRP | (Human) | (Human) | (Human) | (Human) | | AVPY | | VV | (https://www.nature.co |
| | SGIPERFSGSNSGNTATLTISGTQAMD | | | | | | | | | m/articles/s41591-020- |
| | EADYYCQAWDSSTVVFGGGTKLTVL | | | | | | | | | 0998-x) |
| CoV2- | DIQMTQSPSSLSASVGDRVTITCRASQ | IGHV3-30 | IGHJ6 | IGKV1-39 | IGKJ2 | 2416 | ARGSAGNYYY | 3618 | QQSYSTPY | Seth Zost et al., 2020 |
| 2203 | TITNYLNWYQLKSGRAPKLLIYAASSLQ | (Human) | (Human) | (Human) | (Human) | | GMDV | | T | (https://www.nature.co |
| | SGVPSRFSGSGSGTDFTLTISSLQPEDF | | | | | | | | | m/articles/s41591-020- |
| | ATYYCQQSYSTPYTFGQGTKLEIK | | | | | | | | | 0998-x) |
| CoV2- | QSVLTQPPSVSGAPGQRVTISCTGSSS | IGHV5-51 | IGHJ4 | IGLV1-40 | IGLJ3 | 2417 | ASALRERGVQ | 3619 | QSYDSSLG | Seth Zost et al., 2020 |
| 2207 | NIGAGYDVHWYQQLPGTAPKLLIFINS | (Human) | (Human) | (Human) | (Human) | | LWSV | | AL | (https://www.nature.co |
| | NRPSGVPDRFSGSKSGTSASLAITGLQ | | | | | | | | | m/articles/s41591-020- |
| | AEDEADYYCQSYDSSLGALFGGGTKLT | | | | | | | | | 0998-x) |
| | VL | | | | | | | | | |
| CoV2- | DIQMTQSPSSVSASVGDRVTITCRASQ | IGHV3-30- | IGHJ4 | IGKV1-12 | IGKJ3 | 2418 | ARDQEWFRE | 3620 | QQANSFPP | Seth Zost et al., 2020 |
| 2210 | GISSWLAWYQQKPGKAPKLLIYDASSL | 3 | (Human) | (Human) | (Human) | | LFLFDY | | T | (https://www.nature.co |
| | QSGVPSRFSGSGSGTDFTLTISSLQPED | (Human) | | | | | | | | m/articles/s41591-020- |
| | FATYYCQQANSFPPTFGPGTKVDIK | | | | | | | | | 0998-x) |
| CoV2- | EIVLTQSPAILSLSPGERATLSCRASQSV | IGHV3-21 | IGHJ6 | IGKV3-11 | IGKJ1 | 2419 | ARVNGNSN | 3621 | QQRGNW | Seth Zost et al., 2020 |
| 2212 | SSYLAWYQQKPGQAPRLLIYDTSNRAT | (Human) | (Human) | (Human) | (Human) | | WNFGSYYYYY | | WT | (https://www.nature.co |
| | GIPARFSGSGSGTDFTLTISSLEPEDFAF | | | | | | MDV | | | m/articles/s41591-020- |
| | YYCQQRGNWWTFAQGTKVEIK | | | | | | | | | 0998-x) |
| CoV2- | EIVLTQSPATLSLSPGERATLSCRASQS | IGHV1-69 | IGHJ4 | IGKV3-11 | IGKJ3 | 2420 | ARIGHFDSSG | 3622 | QHRTNWP | Seth Zost et al., 2020 |
| 2214 | VSSFLAWYQQKPGQAPRLLIYDASNR | (Human) | (Human) | (Human) | (Human) | | YYLDY | | PLFT | (https://www.nature.co |
| | PTGIPARFTGSGSGTDFTLTISSLEPEDF | | | | | | | | | m/articles/s41591-020- |
| | AVYYCQHRTNWPPLFTFGPGTKVDIK | | | | | | | | | 0998-x) |
| CoV2- | EIVMTQSPATLSVSPGERATLSCRASQ | IGHV3-21 | IGHJ6 | IGKV3-15 | IGKJ1 | 2421 | ARWLQLRSD | 3623 | QQCYNWP | Seth Zost et al., 2020 |
| 2215 | SVSNNLAWYQHKPGQAPRLLIYGAST | (Human) | (Human) | (Human) | (Human) | | YYYFGMDV | | PWT | (https://www.nature.co |
| | RATGIPARFSGSGSGTEFTLTISSLQSE | | | | | | | | | m/articles/s41591-020- |
| | DFAVYFCQQCYNWPPWTFGQGTKVE | | | | | | | | | 0998-x) |
| | IK | | | | | | | | | |
| CoV2- | EIVLTQSPATLSLSPGERATLSCRASQS | IGHV1-69 | IGHJ4 | IGKV3-11 | IGKJ4 | 2422 | ARTSHYDSSG | 3624 | HKRSNWP | Seth Zost et al., 2020 |
| 2216 | VSSYLAWYQQKPGQAPRLLIYDASNR | (Human) | (Human) | (Human) | (Human) | | SYFEY | | PSLT | (https://www.nature.co |
| | ATGIPARFSGSGSGTDFTLTISSLDPED | | | | | | | | | m/articles/s41591-020- |
| | FAVYYCHKRSNWPPSLTFGGGTKVEIK | | | | | | | | | 0998-x) |
| CoV2- | DIVMTQSPDSLAVSLGERATINCKSSQ | IGHV3-30 | IGHJ6 | IGKV4-1 | IGKJ1 | 2423 | ARPYTGSYKS | 3625 | QQYYSISW | Seth Zost et al., 2020 |
| 2218 | SVLYSSNNKNSLAWYQQKPGQPPKLLI | (Human) | (Human) | (Human) | (Human) | | YMDV | | T | (https://www.nature.co |
| | YWASTRESGVPDRFSGSGSGTDFTLTI | | | | | | | | | m/articles/s41591-020- |
| | SSLQAEDVAVYYCQQYYSISWTFGQG | | | | | | | | | 0998-x) |
| | TKVEIK | | | | | | | | | |
| CoV2- | QSALTQPASVSGSPGQSITISCTGTSSD | IGHV4-59 | IGHJ4 | IGLV2-23 | IGLJ2 | 2424 | ARAPRERLQ | 3626 | CSYAVST | Seth Zost et al., 2020 |
| 2222 | VGSYNLVSWYQQHAGKAPKLMIYEVI | (Human) | (Human) | (Human) | (Human) | | WGEYYFDY | | TYVI | (https://www.nature.co |
| | KRPSGVSNRFSGSKSGNTASLTISGLQ | | | | | | | | | m/articles/s41591-020- |
| | AEDEADYYCCSYAVSTTYVIFGGGTKLT | | | | | | | | | 0998-x) |
| | VL | | | | | | | | | |
| CoV2- | DIVMTQSPDSLAVSLGERATINCKSSQ | IGHV3-30 | IGHJ4 | IGKV4-1 | IGKJ1 | 2425 | AKDGSIAAAD | 3627 | QQYYSTP | Seth Zost et al., 2020 |
| 2224 | SVLHSSNNKDSLVWYQQKPGQPPKLL | (Human) | (Human) | (Human) | (Human) | | Y | | WT | (https://www.nature.co |
| | IYWASSRESGVPDRFSGSGSGTDFTLTI | | | | | | | | | m/articles/s41591-020- |
| | SSLQAEDVAVYYCQQYYSTPWTFGQG | | | | | | | | | 0998-x) |
| | TKVEIK | | | | | | | | | |
| CoV2- | QPVLTQPPSASASLGASVTLTCTLSSGY | IGHV5-51 | IGHJ4 | IGLV9-49 | IGLJ2 | 2426 | ATHRCSGGFC | 3628 | GADHGSG | Seth Zost et al., 2020 |
| 2226 | SNYKVDWYQQRPGKGPRFVMRVGT | (Human) | (Human) | (Human) | (Human) | | YLAY | | SNFVFVV | (https://www.nature.co |
| | GGIVGSKGDGIPDRFSVLGSGLNRYLTI | | | | | | | | | m/articles/s41591-020- |
| | KNIQEEDESDYHCGADHGSGSNFVFV | | | | | | | | | 0998-x) |
| | VFGGGTKLTVL | | | | | | | | | |
| CoV2- | DIVMTQSPLSLPVTPGEPASISCRSSQS | IGHV3-33 | IGHJ6 | IGKV2-28 | IGKJ3 | 2427 | ARDQSQGAYI | 3629 | MQALQTP | Seth Zost et al., 2020 |
| 2227 | LLHSNGYNYLDWYLQKPGQSPQFLIYL | (Human) | (Human) | (Human) | (Human) | | LTGYRGYGM | | | (https://www.nature.co |
| | GSNRASGVPDRFSGSGSGTDFILKISR | | | | | | DV | | | m/articles/s41591-020- |
| | VEAEDVGVYYCMQALQTPFTFGPGTK | | | | | | | | | 0998-x) |
| | VDIK | | | | | | | | | |
| CoV2- | EIVMTQSPATLSVSPGERATLSCRASQ | IGHV4-34 | IGHJ6 | IGKV3-15 | IGKJ4 | 2428 | ARPPQAARIH | 3630 | QQYNYWP | Seth Zost et al., 2020 |
| 2228 | SVSSNLAWYQQKPGQAPRLLIYGAST | (Human) | (Human) | (Human) | (Human) | | YYYYMDV | | PLT | (https://www.nature.co |
| | RATGIPARFSGSGSGTEFTLTISSLQSE | | | | | | | | | m/articles/s41591-020- |
| | DFAVYYCQQYNYWPPLTFGGGTKVEI | | | | | | | | | 0998-x) |
| | K | | | | | | | | | |
| CoV2- | SYVLTQPPSVSVAPGKTARITCEGNNI | IGHV3-9 | IGHJ6 | IGLV3-21 | IGLJ2 | 2429 | AKGRGAGYTS | 3631 | QVWDSSS | Seth Zost et al., 2020 |
| 2231 | GSKSVHWYQQKPGQAPVLVVYDDSG | (Human) | (Human) | (Human) | (Human) | | YMDV | | DHHVV | (https://www.nature.co |
| | RPSGIPERFSGSNSGNTATLTISRVEAG | | | | | | | | | m/articles/s41591-020- |
| | DEADYFCQVWDSSSDHHVVFGGGTK | | | | | | | | | 0998-x) |
| | LTVL | | | | | | | | | |

| | | | | | Not | | | | | |
|---|---|---|---|---|---|---|---|---|---|---|
| | Ab | | | Neutral- | Neutral- | | | SEQ | | SEQ |
| | or | | Doesn't | ising | ising | Protein + | | ID | | ID |
| Name | Nb | Binds to | Bind to | Vs | Vs | Epitope | Origin | NO.: | VH or VHH | NO.: |
| CoV2- | Ab | SARS-CoV1, | | | SARS-CoV2 | S; non- | B-cells; SARS-CoV2 | 342 | EVQLVESGGGLIQPGGSLRLSCAASGFIV | 1421 |
| 2235 | | SARS-CoV2 | | | | RBD | Human Patient | | SSNYMSWVRQAPGKGLEWVSVIYSGG | |
| | | | | | | | | | STYYADSVKGRFTISRDNSKNTLYLQMN | |
| | | | | | | | | | SLRAEDTAVYYCARESTQWGQGTLVTV | |
| | | | | | | | | | SS | |
| CoV2- | Ab | SARS-CoV2 | SARS- | | SARS-CoV1, | S; non- | B-cells; SARS-CoV2 | 343 | QITLKESGPPLVEPKQTLTLTCTFSGFSLT | 1422 |
| 2238 | | | CoV1 | | SARS-CoV2 | RBD | Human Patient | | TSGEAVGWIRQPPGKALEWLALIYWDD | |
| | | | | | | | | | DKHYSPSLRNRLTITRDTSKNQVVLTLTN | |
| | | | | | | | | | VDPADTGTYYCAHRAVILNFDHWGQGF | |
| | | | | | | | | | LVTVSS | |
| CoV2- | Ab | SARS-CoV1, | | | SARS-CoV2 | S; non- | B-cells; SARS-CoV2 | 344 | QVQLVESGGGVVQPGRSLRLSCAASGF | 1423 |
| 2239 | | SARS-CoV2 | | | | RBD | Human Patient | | TFSSYAMHWVRQAPGKGLEWVAVISY | |
| | | | | | | | | | DGINKYYADAVKGRFTISRDNSKNTLYL | |
| | | | | | | | | | QMNSLRAEDTAVYYCARPRSGSYYAYFD | |
| | | | | | | | | | YWGQGTLVTVSS | |
| CoV2- | Ab | SARS-CoV2 | SARS- | | SARS-Cov1, | S; RBD | B-cells; SARS-CoV2 | 345 | EVQLVESGGGLVQPGRSLRLSCAASGFT | 1424 |
| 2240 | | | CoV1 | | SARS-CoV2 | | Human Patient | | FDDYAMHWVRQAPGKGLEWVSGISW | |
| | | | | | | | | | NSGSIGYADSVKGRFTISRDNAKNSLYLQ | |
| | | | | | | | | | MNSLRAEDTALYYCAKVGYTISRQWLV | |
| | | | | | | | | | GEFDYWGQGTLVTVSS | |
| CoV2- | Ab | SARS-CoV2 | SARS- | | SARS-CoV1, | S; non- | B-cells; SARS-CoV2 | 346 | EVQLVQSGAEVKKPGESLKISCKGSGYSF | 1425 |
| 2241 | | | CoV1 | | SARS-CoV2 | RBD | Human Patient | | TSYWIDWVRQMPGKGLEWMGIIYPGD | |
| | | | | | | | | | SDTRYSPSFQGQVTISADKSTSTAYLQW | |
| | | | | | | | | | SSLKASDTAMYYCARRGEAAGIWYFDL | |
| | | | | | | | | | WGRGTLVTVSS | |
| CoV2- | Ab | SARS-CoV2 | SARS- | | SARS-CoV1, | S; RBD | B-cells; SARS-CoV2 | 347 | QLQLQESGPGLVKPSETLPLTCTVSGGSI | 1426 |
| 2243 | | | CoV1 | | SARS-CoV2 | | Human Patient | | SSSSYYWGWIRQPPGKGLQWIGNIYYS | |
| | | | | | | | | | GSTYYNSSLKSRVTISVDTSKNQFSLKLSS | |
| | | | | | | | | | VTAADTAVYYCARQSRGYSYAWSFDYW | |
| | | | | | | | | | GQGTLVTVSS | |
| CoV2- | Ab | SARS-CoV2 | SARS- | | SARS-CoV1, | S; non- | B-cells; SARS-CoV2 | 348 | QVQLVESGGGVVQPGRSLRLSCAASGF | 1427 |
| 2245 | | | CoV1 | | SARS-CoV2 | RBD | Human Patient | | TFSNYGIHWVRQAPGQGLEWVAGIWY | |
| | | | | | | | | | DGSNKYYVDSVKGRFTISRDNSKNTLYL | |
| | | | | | | | | | QMNSLRAEDTAVYYCAGSSGEGGLYYY | |
| | | | | | | | | | YGMDVWGQGTTVTVSS | |
| CoV2- | Ab | SARS-CoV2 | SARS- | | SARS-CoV1, | S; non- | B-cells; SARS-CoV2 | 349 | QVQLVESGGGVVQPGRSLRLSCAASGF | 1428 |
| 2248 | | | CoV1 | | SARS-CoV2 | RBD | Human Patient | | TFDSYGVHWVRQAPGKGLEWVAVISYD | |
| | | | | | | | | | GSNKHYADSVKGRFTISRDNSKNTLYVQ | |
| | | | | | | | | | MNSLRTEDTAVYYCARDSGGNYGDSYF | |
| | | | | | | | | | DYWGQGTLVTVSS | |
| CoV2- | Ab | SARS-CoV1, | | | SARS-CoV2 | S; non- | B-cells; SARS-CoV2 | 350 | QVQLVESGGGVVQPGRSLRLSCAASGF | 1429 |
| 2250 | | SARS-CoV2 | | | | RBD | Human Patient | | TFSTYAMHWVRQAPGKGLAWVALISYD | |
| | | | | | | | | | GYNKYYADSVRGRFTISRINSKNTLSLQM | |
| | | | | | | | | | NSLRAEDTAVYYCARGSAGNYYYGMDV | |
| | | | | | | | | | WGQGTTVTVSS | |
| CoV2- | Ab | SARS-CoV2 | SARS- | | SARS-CoV1, | S; NTD | B-cells; SARS-CoV2 | 351 | QVTLKESGPVLVKPTETLTLTCAVSGFSLS | 1430 |
| 2251 | | | CoV1 | | SARS-CoV2 | | Human Patient | | NAKMGVSWIRQPPGKALEWLAHIFSN | |
| | | | | | | | | | DEKAYSTSLKTRLTISKDTSKSQVVLTVTN | |
| | | | | | | | | | MDPVDTATYYCARIVLGASGTYPSPGFD | |
| | | | | | | | | | PWGQGTLVTVSS | |
| CoV2- | Ab | SARS-CoV2 | SARS- | | SARS-CoV1, | S; RBD | B-cells; SARS-CoV2 | 352 | EVQLVESGGGLVQPGGSLRLSCAASGFT | 1431 |
| 2253 | | | CoV1 | | SARS-CoV2 | | Human Patient | | FSSYWMHWVRQVPGKGLVWVSRINSD | |
| | | | | | | | | | GSSTSYADSVKGRFTISRDNAKNTLYLE | |
| | | | | | | | | | MNSLRAQDTAVYYCAGSPWLRGDIDY | |
| | | | | | | | | | WGQGTLVTVSS | |
| CoV2- | Ab | SARS-CoV1, | | | SARS-CoV2 | S; RBD | B-cells; SARS-CoV2 | 353 | QVQLVQSGSELTKPGASVKVSCKASGYT | 1432 |
| 2256 | | SARS-CoV2 | | | | | Human Patient | | FTSYAMNWVRQAPGQGLEWMGWINT | |
| | | | | | | | | | DTGNPTYAQGFTGRFVFSLDTSVSTAYL | |
| | | | | | | | | | QISSLKAEDTAVYYCARDPSYCSSTRCYT | |
| | | | | | | | | | VGWFDPWGQGTLVTVSS | |
| CoV2- | Ab | SARS-CoV2 | SARS- | | SARS-CoV1, | S; NTD | B-cells; SARS-CoV2 | 354 | QVQLQESGPGLVKPSQTLSLTCTVSGDSI | 1433 |
| 2257 | | | CoV1 | | SARS-CoV2 | | Human Patient | | NSGNYYWSWIRQPAGKGLEWIGRMFT | |
| | | | | | | | | | SGSTNYNPSLTSRVTMSIDTSKNQFSLNL | |
| | | | | | | | | | NSVTAADTAMYYCARGHVAAWESCYY | |
| | | | | | | | | | WGQGILVTVSS | |
| CoV2- | Ab | SARS-CoV1, | | SARS-CoV2 | | S; RBD | B-cells; SARS-CoV2 | 355 | EVQLVESGGGVVRPGGSLRLSCAASGFT | 1434 |
| 2258 | | SARS-CoV2 | | | | | Human Patient | | LDDYGLSWVRHAPGKGLEWVSGINWN | |
| | | | | | | | | | GGRTAYADSVKGRFTISRDNAKNSLYLQ | |
| | | | | | | | | | MNSLRAEDTALYHCARARGPSEQYYDLL | |
| | | | | | | | | | TGYYDAFDIWGQGTMVTVSS | |

| | | | | | | SEQ | | SEQ | | |
|---|---|---|---|---|---|---|---|---|---|---|
| | | Heavy V | Heavy J | Light V | Light J | ID | | ID | | |
| Name | VL | Gene | Gene | Gene | Gene | NO.: | CDRH3 | NO.: | CDRL3 | Sources |
| CoV2- | DIQMTQSPSTLSASVGDRVTITCRASH | IGHV3-53 | IGHJ4 | IGKV1-5 | IGKJ1 | 2430 | ARESTQ | 3632 | QQYNTYS | Seth Zost et al., 2020 |
| 2235 | SISSWLAWYQQKPGKAPKLLIYKASSL | (Human) | (Human) | (Human) | (Human) | | | | QT | (https://www.nature.co |
| | ESGVPSRFSGSGSGTEFTLTISSLQPDD | | | | | | | | | m/articles/s41591-020- |
| | FATYYCQQYNTYSQTFGQGTKVEIK | | | | | | | | | 0998-x) |
| CoV2- | FYELTQPPSVSVSPGQTAGITCSGDKL | IGHV2-5 | IGHJ4 | IGLV3-1 | IGLJ3 | 2431 | AHRAVILNFD | 3633 | QAWDND | Seth Zost et al., 2020 |
| 2238 | GHKYAYWYQQKPGQSPILLIYQDDKR | (Human) | (Human) | (Human) | (Human) | | H | | AGVV | (https://www.nature.co |
| | PSGIPERFSGSNSGTIATLTISGTQPVD | | | | | | | | | m/articles/s41591-020- |
| | EADYYCQAWDNDAGVVFGGGTKLTV | | | | | | | | | 0998-x) |
| | L | | | | | | | | | |
| CoV2- | DIQMTQSPSSLSASVGDRVTITCRASQ | IGHV3-30- | IGHJ4 | IGKV1-16 | IGKJ4 | 2432 | ARPRSGSYYA | 3634 | QQYNSHP | Seth Zost et al., 2020 |
| 2239 | GISNYLAWFQQKPGKAPKSLIYAASSL | 3 | (Human) | (Human) | (Human) | | YFDY | | PT | (https://www.nature.co |
| | QSGVPSKFSGSGSGTDFTLTISSLQPED | (Human) | | | | | | | | m/articles/s41591-020- |
| | VATYYCQQYNSHPPTFGGGTKVEIK | | | | | | | | | 0998-x) |
| CoV2- | QSALTQPPSASGSPGQSVTISCTGTSS | IGHV3-9 | IGHJ4 | IGLV2-8 | IGLJ2 | 2433 | AKVGYTISRQ | 3635 | SAYAGSNN | Seth Zost et al., 2020 |
| 2240 | DVGTYNYVSWYQQHPGKAPKLMIYE | (Human) | (Human) | (Human) | (Human) | | WLVGEFDY | | LV | (https://www.nature.co |
| | VSKRPSGVPDRFSGSKSGNTASLTVSG | | | | | | | | | m/articles/s41591-020- |
| | LQAEDEAEYYCSAYAGSNNLVFGGGT | | | | | | | | | 0998-x) |
| | KLTVL | | | | | | | | | |
| CoV2- | QPVLTQPPSASASLGASVTLTCTLSSGY | IGHV5-51 | IGHJ2 | IGLV9-49 | IGLJ2 | 2434 | ARRGEAAGI | 3636 | GADHGSG | Seth Zost et al., 2020 |
| 2241 | SNYKVDWYQQRPGKGPRFVMRVGT | (Human) | (Human) | (Human) | (Human) | | WYFDL | | SNFEYVV | (https://www.nature.co |
| | GGIVGSKGDGIPDRFSVLGSGLNRYLTI | | | | | | | | | m/articles/s41591-020- |
| | KNIQEEDESDYHCGADHGSGSNFEYV | | | | | | | | | 0998-x) |
| | VFGGGTKLTVL | | | | | | | | | |
| CoV2- | QSALTQPASVSGSHGQSITISCTGTSSD | IGHV4-39 | IGHJ4 | IGLV2-23 | IGLJ2 | 2435 | ARQSRGYSYA | 3637 | CSYAGIVL | Seth Zost et al., 2020 |
| 2243 | VGSYNLVSWYQQHPGKAPKLMIYEVS | (Human) | (Human) | (Human) | (Human) | | WSFDY | | | (https://www.nature.co |
| | KRPSGVSNRFSGSTSGNTASLTISGLQ | | | | | | | | | m/articles/s41591-020- |
| | AEDEADYYCCSYAGIVLFGGGTKVTVL | | | | | | | | | 0998-x) |
| CoV2- | SYELTQPPSVSVSPGQTTRITCSGDALP | IGHV3-33 | IGHJ6 | IGLV3-25 | IGLJ3 | 2436 | AGSSGEGGLY | 3638 | QSGDSSGT | Seth Zost et al., 2020 |
| 2245 | KQYGYWYQQKAGQAPILVIYKDSERP | (Human) | (Human) | (Human) | (Human) | | YYYGMDV | | YVV | (https://www.nature.co |
| | SGIPERFSGSSSGTTVTLTISGVQAEDE | | | | | | | | | m/articles/s41591-020- |
| | AHYYCQSGDSSGTYVVFGGGTKLTVL | | | | | | | | | 0998-x) |
| CoV2- | SYELTQPPSVSVSPGQTARITCSGDALS | IGHV3-30 | IGHJ4 | IGLV3-25 | IGLJ3 | 2437 | ARDSGGNYG | 3639 | QSVDRSGT | Seth Zost et al., 2020 |
| 2248 | KQYAYWYQQKPGQAPVLVIYKDSERP | (Human) | (Human) | (Human) | (Human) | | DSYFDY | | YFNWV | (https://www.nature.co |
| | SGIPERFSGSSSGTTVTLTISGVQAEDE | | | | | | | | | m/articles/s41591-020- |
| | ADYYCQSVDRSGTYFNWVFGGGTKLT | | | | | | | | | 0998-x) |
| | VL | | | | | | | | | |
| CoV2- | DIQMTQSPSSLSASVGDRVTITCRASQ | IGHV3-30 | IGHJ6 | IGKV1-39 | IGKJ2 | 2438 | ARGSAGNYYY | 3640 | QQSYSTPY | Seth Zost et al., 2020 |
| 2250 | TITNYLNWYQLKSGRAPKLLIYAASSLQ | (Human) | (Human) | (Human) | (Human) | | GMDV | | T | (https://www.nature.co |
| | SGVPSRFSGSGSGTDFTLTISSLQPEDF | | | | | | | | | m/articles/s41591-020- |
| | ATYYCQQSYSTPYTFGQGTKLEIK | | | | | | | | | 0998-x) |
| CoV2- | QTVVTQEPSLTVSPGGTVTLTCASSAG | IGHV2-26 | IGHJ5 | IGLV7-43 | IGLJ3 | 2439 | ARIVLGASGT | 3641 | LLYYGGA | Seth Zost et al., 2020 |
| 2251 | AVTSGYYPNWFQQKPGQAPRALIYST | (Human) | (Human) | (Human) | (Human) | | YPSPGFDP | | WV | (https://www.nature.co |
| | ANKHSWTLARFSGSLLGGKAALTLSG | | | | | | | | | m/articles/s41591-020- |
| | VQPEDEAEYYCLLYYGGAWVFGGGTK | | | | | | | | | 0998-x) |
| | LTVL | | | | | | | | | |
| CoV2- | NFMLTQPHSVSESPGKTVTISCTGSSG | IGHV3-74 | IGHJ4 | IGLV6-57 | IGLJ2 | 2440 | AGSPWLRGDI | 3642 | QSYDGSN | Seth Zost et al., 2020 |
| 2253 | SIASNYVQWYQQRPGSAPTTVIYEDN | (Human) | (Human) | (Human) | (Human) | | DY | | HAVV | (https://www.nature.co |
| | QRPSGVPDRFSGSIDSSSNSASLTISGL | | | | | | | | | m/articles/s41591-020- |
| | MTEDEADYYCQSYDGSNHAVVFGGG | | | | | | | | | 0998-x) |
| | TKLTVL | | | | | | | | | |
| CoV2- | SYVLTQPPSVSVAPGKTARITCGGNNI | IGHV7-4- | IGHJ5 | IGLV3-21 | IGLJ2 | 2441 | ARDPSYCSST | 3643 | QVWDSSS | Seth Zost et al., 2020 |
| 2256 | GSKNVHWYQQKPGQAPVVVVYDDS | 1 | (Human) | (Human) | (Human) | | RCYTVGWFD | | DPVV | (https://www.nature.co |
| | DRPSGIPERFSGSNSGNTATLTISRVEA | (Human) | | | | | P | | | m/articles/s41591-020- |
| | GDEADYYCQVWDSSSDPVVFGGGTK | | | | | | | | | 0998-x) |
| | LTVL | | | | | | | | | |
| CoV2- | NIVMTQSPLSLPVTPGEPASISCRSSQS | IGHV4-61 | IGHJ4 | IGKV2-28 | IGKJ1 | 2442 | ARGHVAAWE | 3644 | MQALQTP | Seth Zost et al., 2020 |
| 2257 | LLNSNGLTYLDWYLQKPGQSPQLLIYF | (Human) | (Human) | (Human) | (Human) | | SCYY | | QT | (https://www.nature.co |
| | VSNRASGVSDRFSGSGSGADFTLTISR | | | | | | | | | m/articles/s41591-020- |
| | VEAEDVGVYYCMQALQTPQTFGQGT | | | | | | | | | 0998-x) |
| | KVEIK | | | | | | | | | |
| CoV2- | EIVLTQSPGTLSLSPGERATLSCGASQSI | IGHV3-20 | IGHJ3 | IGKV3-20 | IGKJ4 | 2443 | ARARGPSEQY | 3645 | QQYGGSLT | Seth Zost et al., 2020 |
| 2258 | SSSYLAWYQQKPGQAPRLLIYGASSRA | (Human) | (Human) | (Human) | (Human) | | YDLLTGYYDA | | | (https://www.nature.co |
| | AGIPDRFSGSGSGTDFTLTISRLEPEDF | | | | | | FDI | | | m/articles/s41591-020- |
| | AVYFCQQYGGSLTFGGGTKVEIK | | | | | | | | | 0998-x) |

| | | | | | Not | | | | | |
|---|---|---|---|---|---|---|---|---|---|---|
| | Ab | | | Neutral- | Neutral- | | | SEQ | | SEQ |
| | or | | Doesn't | ising | ising | Protein + | | ID | | ID |
| Name | Nb | Binds to | Bind to | Vs | Vs | Epitope | Origin | NO.: | VH or VHH | NO.: |
| CoV2- | Ab | SARS-CoV2 | SARS- | | SARS-CoV1, | S; NTD | B-cells; SARS-CoV2 | 356 | EVQLLESGGGLVHPGGSLRLSCAASGFT | 1435 |
| 2260 | | | CoV1 | | SARS-CoV2 | | Human Patient | | FSSYALSWVRQAPGKGLEWVSAISGSG | |
| | | | | | | | | | GSTYYADSVKGRFTISRDNSKNTLYLQM | |
| | | | | | | | | | NRLRAEDTAVYYCAQMGPLGSTSSAAD | |
| | | | | | | | | | YWGQGTLVTVSS | |
| CoV2- | Ab | SARS-CoV2 | SARS- | SARS-CoV2 | | S; non- | B-cells; SARS-CoV2 | 357 | QVQLVQSGAEVKKPGASVKVSCKASGY | 1436 |
| 2262 | | | CoV1 | (weak) | | RBD | Human Patient | | TFTSYDINWVRQATGQGLEWMGWMN | |
| | | | | | | | | | PNSGNTGYAQKFQGRVTMTRNTSISTA | |
| | | | | | | | | | YMELSSLRSEDTALYYCAREARYFDWIFE | |
| | | | | | | | | | GSDYYYYGMDVWGQGTTVTVSS | |
| CoV2- | Ab | SARS-CoV2 | SARS- | | SARS-CoV1, | S; NTD | B-cells; SARS-CoV2 | 358 | EVQLVESGGGLVQPGGSLRLSCEASGFT | 1437 |
| 2263 | | | CoV1 | | SARS-CoV2 | | Human Patient | | FSSSEINWVRQAPGKGLEWVSHISSSGSI | |
| | | | | | | | | | IYYADSVKGRFTISRDNAKNSLYLQMNSL | |
| | | | | | | | | | RAEDTAVYYCARRSYRSSWYYYYGMDV | |
| | | | | | | | | | WGQGTTVTVSS | |
| CoV2- | Ab | SARS-CoV1, | | | SARS-CoV2 | S; non- | B-cells; SARS-CoV2 | 359 | EVQLVESGGGLVQPGRSLRLSCTASGFIF | 1438 |
| 2266 | | SARS-CoV2 | | | | RBD | Human Patient | | GDYAMGWVRQAPGKGLEWVGFIRGK | |
| | | | | | | | | | AYDGTTEYAASVKGRFTISRDDSKYIAHL | |
| | | | | | | | | | QMNSLKTEDTAVYYCIRDYDFWGGYYY | |
| | | | | | | | | | HPLRAFDIWGRGTMVTVSS | |
| CoV2- | Ab | SARS-CoV2 | SARS- | SARS-CoV2 | | S; RBD | B-cells; SARS-CoV2 | 360 | QITLKESGPTLVKPTQTLTLTCTFSGFSLS | 1439 |
| 2268 | | | CoV1 | | | | Human Patient | | TSGVGVGWIRQPPGKALEWLALIYWD | |
| | | | | | | | | | DDKRYSPSLKSRLSITKDTSKNQVVLTMT | |
| | | | | | | | | | NMDPVDTGTYYCARHQIVVLFDMWG | |
| | | | | | | | | | QGTRVTVSS | |
| CoV2- | Ab | SARS-CoV1, | | | SARS-CoV2 | S; non- | B-cells; SARS-CoV2 | 361 | QVQLVQSGAEVKKPGSSVKVSCKASGG | 1440 |
| 2270 | | SARS-CoV2 | | | | RBD | Human Patient | | TFSSYAISWVRQAPGQGLEWMGGIIPIF | |
| | | | | | | | | | GTANYAQKFQGRVTITADESTSTAYMEL | |
| | | | | | | | | | SSLRSEDTAVYYCAITYYYDSSGYWWDD | |
| | | | | | | | | | WGQGTLVTVSS | |
| CoV2- | Ab | SARS-CoV1, | | | SARS-CoV2 | S; non- | B-cells; SARS-CoV2 | 362 | QLQLQESGPGLVKPSETLSLTCTVSGGSI | 1441 |
| 2273 | | SARS-CoV2 | | | | RBD | Human Patient | | SSSSYYWGWIRQPPGKGLEWIGTIYYSG | |
| | | | | | | | | | STYYNPSLKSRVTISVDTSKKQFSLKLSSV | |
| | | | | | | | | | TAADTAVYYCAGEEVRGVKLYYYYAMD | |
| | | | | | | | | | VWGQGTTVTVSS | |
| CoV2- | Ab | SARS-CoV1, | | | SARS-CoV2 | S; non- | B-cells; SARS-CoV2 | 363 | EVQLVESGGRLVLPGGSLRLSCAASGFTF | 1442 |
| 2274 | | SARS-CoV2 | | | | RBD | Human Patient | | SVYEMNWVRQAPGKGLEWLSYIGTSGS | |
| | | | | | | | | | PIYYADSVKGRFTVSRDNAKNSLYLQMN | |
| | | | | | | | | | SLRVEDTALYYCARDRGWNYGLDYWG | |
| | | | | | | | | | QGTLVTVSS | |
| CoV2- | Ab | SARS-CoV2 | SARS- | | SARS-CoV1, | S; RBD | B-cells; SARS-CoV2 | 364 | QVQLVESGGGVVQPGRSLRLSCAASGF | 1443 |
| 2277 | | | CoV1 | | SARS-CoV2 | | Human Patient | | TFSSYAMHWVRQAPGKGLEWVALISSD | |
| | | | | | | | | | GGNKFYADSVKGRFTISRDNSKNTLYLQ | |
| | | | | | | | | | MNSLRAEDTAVYYCARDVPTTVTAFTVF | |
| | | | | | | | | | TYWGQGTLVTVSS | |
| CoV2- | Ab | SARS-CoV1, | | | SARS-CoV2 | S; non- | B-cells; SARS-CoV2 | 365 | QVQLVESGGGVVQPGRSLRLSCAASGF | 1444 |
| 2281 | | SARS-CoV2 | | | | RBD | Human Patient | | AFSNYAIHWVRQAPGKGLEWVAVISYD | |
| | | | | | | | | | GNNKDYADSVKGRFTISRDNSKNTLYLQ | |
| | | | | | | | | | MNSLRAEDTAVYYCARVPVMVRGVYF | |
| | | | | | | | | | DYWGQGTLVTVSS | |
| CoV2- | Ab | SARS-CoV1, | | | SARS-CoV2 | S; RBD | B-cells; SARS-CoV2 | 366 | QVQLVQSGAEVKKPGASVKVSCKVSGY | 1445 |
| 2287 | | SARS-CoV2 | | | | | Human Patient | | TFTSYDINWVRQATGQGLEWMGWMN | |
| | | | | | | | | | PNSGHTGYAQKFQGRVTMTRNTSISTA | |
| | | | | | | | | | YMELSSLRYEDTAVYYCARGYGLTYYMD | |
| | | | | | | | | | VWGKGTTVTVSS | |
| CoV2- | Ab | SARS-CoV2 | SARS- | SARS-CoV2 | | S; RBD | B-cells; SARS-CoV2 | 367 | QVQLAQSGAEVKKPGASVKVSCKAAGY | 1446 |
| 2290 | | | CoV1 | (weak) | | | Human Patient | | TFTSYDINWVRQATGQGLEWMGWMN | |
| | | | | | | | | | PNSGNAGYAQKFQGRVTMTRDTSISTA | |
| | | | | | | | | | YMELSSLRSEDTAVYYCARMRSGWPTH | |
| | | | | | | | | | GRPDDFWGRGTLVTVSS | |
| CoV2- | Ab | SARS-CoV2 | SARS- | | SARS-CoV1, | S; NTD | B-cells; SARS-CoV2 | 368 | EVQLLQSGGGLVQPGGSLRLSCAASGFT | 1447 |
| 2293 | | | CoV1 | | SARS-CoV2 | | Human Patient | | FRNYAMSWVRQAPGKGLEWVSAISGS | |
| | | | | | | | | | GGTTYYADSVKGRFTISRDNSKNTLYLQ | |
| | | | | | | | | | MNSLRAEDTAVYYCAKNERITMLVVVTL | |
| | | | | | | | | | FDYWGQGTLVTVSS | |
| CoV2- | Ab | SARS-CoV2 | SARS- | | SARS-CoV1, | S; non- | B-cells; SARS-CoV2 | 369 | EVQLVESGGGLVQPGGSLRLSCAASGFT | 1448 |
| 2296 | | | CoV1 | | SARS-CoV2 | RBD | Human Patient | | VSGNYMSWVRQAPGKGLEWVSVIYSG | |
| | | | | | | | | | GSTYYADSVKGRFTISRDNSKNTLYLQM | |
| | | | | | | | | | NSPRAEDTAVYYCARDPSAYYDILTGYSG | |
| | | | | | | | | | DVWGKGTTVTVSS | |

| | | | | | | SEQ | | SEQ | | |
|---|---|---|---|---|---|---|---|---|---|---|
| | | Heavy V | Heavy J | Light V | Light J | ID | | ID | | |
| Name | VL | Gene | Gene | Gene | Gene | NO.: | CDRH3 | NO.: | CDRL3 | Sources |
| CoV2- | SYELTQPPSVSVSPGQTASITCSGDKM | IGHV3-23 | IGHJ4 | IGLV3-1 | IGLJ2 | 2444 | AQMGPLGST | 3646 | QAWDSSL | Seth Zost et al., 2020 |
| 2260 | GDKYACWYQQKPGQSPVVVIYEDNK | (Human) | (Human) | (Human) | (Human) | | SSAADY | | VV | (https://www.nature.co |
| | RPSGIPERFSGSNSGNTATLTISGTQA | | | | | | | | | m/articles/s41591-020- |
| | MDEADYYCQAWDSSLVVFGGGTKLT | | | | | | | | | 0998-x) |
| | VL | | | | | | | | | |
| CoV2- | QSALTQPPSVSGSPGQSVTISCTGTSS | IGHV1-8 | IGHJ6 | IGLV2-18 | IGLJ3 | 2445 | AREARYFDWI | 3647 | SSYTSSSL | Seth Zost et al., 2020 |
| 2262 | DVGSYNRVSWYQQPPGTAPKLMIYE | (Human) | (Human) | (Human) | (Human) | | FEGSDYYYYG | | RV | (https://www.nature.co |
| | VSNRPSGVPDRFSGSKSGNTASLTISG | | | | | | MDV | | | m/articles/s41591-020- |
| | LQAEDEADYYCSSYTSSSLRVFGGGTK | | | | | | | | | 0998-x) |
| | LTVL | | | | | | | | | |
| CoV2- | DIQLTQSPSFLSASVGDRVTITCRASQG | IGHV3-48 | IGHJ6 | IGKV1-9 | IGKJ1 | 2446 | ARRSYRSSWY | 3648 | QQLNSYPV | Seth Zost et al., 2020 |
| 2263 | ISSYLAWYQQKPGKAPKLLIYAASTLQS | (Human) | (Human) | (Human) | (Human) | | YYYGMDV | | T | (https://www.nature.co |
| | GVPSRFSGSGSGTEFTLTISSLQPEDFA | | | | | | | | | m/articles/s41591-020- |
| | TYYCQQLNSYPVTFGQGTKVEIK | | | | | | | | | 0998-x) |
| CoV2- | QSALTQPRSVSGSPGQSVTISCTGTSS | IGHV3-49 | IGHJ3 | IGLV2-11 | IGLJ1 | 2447 | IRDYDFWGG | 3649 | CSYAGSYT | Seth Zost et al., 2020 |
| 2266 | DVGGYNYVSWYQQHPGKAPKLMIYD | (Human) | (Human) | (Human) | (Human) | | YYYHPLRAFD | | YV | (https://www.nature.co |
| | VTKRPSGVPERFSGSKSGNTASLTISGL | | | | | | I | | | m/articles/s41591-020- |
| | QAEDEADYSCCSYAGSYTYVFGTGTKV | | | | | | | | | 0998-x) |
| | TVL | | | | | | | | | |
| CoV2- | QSALTQPASVSGSPGQSITISCTGTGSD | IGHV2-5 | IGHJ3 | IGLV2-14 | IGLJ2 | 2448 | ARHQIVVLFD | 3650 | SSYTSSST | Seth Zost et al., 2020 |
| 2268 | VGGSNYVSWYQQHPGKAPKLMIYDV | (Human) | (Human) | (Human) | (Human) | | M | | LVL | (https://www.nature.co |
| | SNRPSGVSNRFSGSKSGNTASLTISGL | | | | | | | | | m/articles/s41591-020- |
| | QAEDEADYYCSSYTSSSTLVLFGGGTKL | | | | | | | | | 0998-x) |
| | SVL | | | | | | | | | |
| CoV2- | EIVLTQSPATLSLSPGERATLSCRASQS | IGHV1-69 | IGHJ4 | IGKV3-11 | IGKJ2 | 2449 | AITYYYDSSG | 3651 | QQRSNWP | Seth Zost et al., 2020 |
| 2270 | VSSFLAWYQQKPGQAPRLLIYDASNR | (Human) | (Human) | (Human) | (Human) | | YWWDD | | PSYT | (https://www.nature.co |
| | ATGIPARFSGSGSGTDFTLTISSLEPEDF | | | | | | | | | m/articles/s41591-020- |
| | AVYYCQQRSNWPPSYTFGQGTKLEIK | | | | | | | | | 0998-x) |
| CoV2- | QSALTQPASVSGSPGQSITISCTGTSSD | IGHV4-39 | IGHJ6 | IGLV2-14 | IGLJ3 | 2450 | AGEEVRGVKL | 3652 | SSYTSIST | Seth Zost et al., 2020 |
| 2273 | IGGYNYVSWYQQHPGKAPKLMIYDVS | (Human) | (Human) | (Human) | (Human) | | YYYYAMDV | | WV | (https://www.nature.co |
| | NRPSGVSNRFSGSKSGNTASLTISGLQ | | | | | | | | | m/articles/s41591-020- |
| | AEDEADYYCSSYTSISTWVFGGGTKVT | | | | | | | | | 0998-x) |
| | VL | | | | | | | | | |
| CoV2- | SYELTQPSSVSVSPGQTARITCSGDALP | IGHV3-48 | IGHJ4 | IGLV3-10 | IGLJ2 | 2451 | ARDRGWNYG | 3653 | FSMDSSG | Seth Zost et al., 2020 |
| 2274 | KRYAYWYRQKSGQAPVLVIHEDSKRP | (Human) | (Human) | (Human) | (Human) | | LDY | | DLRV | (https://www.nature.co |
| | SGIPERFSGSTSGTMATLTITGAQLEDE | | | | | | | | | m/articles/s41591-020- |
| | ADYYCFSMDSSGDLRVFGGGTKLTVL | | | | | | | | | 0998-x) |
| CoV2- | DIQMTQSPSSLSASVGDRVTITCRASQ | IGHV3-30 | IGHJ4 | IGKV1-39 | IGKJ4 | 2452 | ARDVPTTVTA | 3654 | QQSYSTPG | Seth Zost et al., 2020 |
| 2277 | SISTYLNWYQQKPGKAPKLLIYAASSLQ | (Human) | (Human) | (Human) | (Human) | | FTVFTY | | LT | (https://www.nature.co |
| | SGVPSRFSGSGSGTDFTLTISSLQPEDY | | | | | | | | | m/articles/s41591-020- |
| | ATYYCQQSYSTPGLTFGGGTKVEIK | | | | | | | | | 0998-x) |
| CoV2- | QSALTQPASVSGSPGQSITISCTGTSSD | IGHV3-30- | IGHJ4 | IGLV2-14 | IGLJ2 | 2453 | ARVPVMVRG | 3655 | ISYTSSRT | Seth Zost et al., 2020 |
| 2281 | VVGYNYVSWYQQHPGKAPKLMIYDV | 3 | (Human) | (Human) | (Human) | | VYFDY | | LV | (https://www.nature.co |
| | RNRPSGVSNRFSGSKSGNTASLTISGL | (Human) | | | | | | | | m/articles/s41591-020- |
| | QAEDEADYFCISYTSSRTLVFGGGTKLT | | | | | | | | | 0998-x) |
| | VL | | | | | | | | | |
| CoV2- | SYVLTQPPSVSVAPGKTARITCGGNNI | IGHV1-8 | IGHJ6 | IGLV3-21 | IGLJ2 | 2454 | ARGYGLTYY | 3656 | QVWDSSY | Seth Zost et al., 2020 |
| 2287 | GSKNVHWYQQKPGQAPVLVVYDDS | (Human) | (Human) | (Human) | (Human) | | MDV | | YHPVV | (https://www.nature.co |
| | DRPSGIPERFSGSNSGNTATLTISRVEA | | | | | | | | | m/articles/s41591-020- |
| | GDEADYYCQVWDSSYYHPVVFGGGT | | | | | | | | | 0998-x) |
| | KLTVL | | | | | | | | | |
| CoV2- | QSVLTQPPSASGTPGQRVTISCSGSNS | IGHV1-8 | IGHJ4 | IGLV1-44 | IGLJ2 | 2455 | ARMRSGWPT | 3657 | LVWDDSL | Seth Zost et al., 2020 |
| 2290 | NIGSYTVNWYQQFPGTAPKLLIYDNN | (Human) | (Human) | (Human) | (Human) | | HGRPDDF | | NGLV | (https://www.nature.co |
| | QRTSGVPDRFSGSKSGTSASLAISGLQ | | | | | | | | | m/articles/s41591-020- |
| | SEDEANYYCLVWDDSLNGLVFGGGTK | | | | | | | | | 0998-x) |
| | LTVL | | | | | | | | | |
| CoV2- | QSVLTQPPSVSAAPGQKVTISCSGSSS | IGHV3-23 | IGHJ4 | IGLV1-51 | IGLJ2 | 2456 | AKNERITMLV | 3658 | GTWDSSLS | Seth Zost et al., 2020 |
| 2293 | NIGNNYISWYQQLPGTAPKLLIYDNNK | (Human) | (Human) | (Human) | (Human) | | VVTLFDY | | AVV | (https://www.nature.co |
| | RPSGIPDRFSGSKSGTSATLGITGLQTG | | | | | | | | | m/articles/s41591-020- |
| | DEADYYCGTWDSSLSAVVFGGGTKLT | | | | | | | | | 0998-x) |
| | VL | | | | | | | | | |
| CoV2- | DIQMTQSPSTLSASVGDRVTITCRASQ | IGHV3-66 | IGHJ6 | IGKV1-5 | IGKJ1 | 2457 | ARDPSAYYDI | 3659 | QQYSIYSW | Seth Zost et al., 2020 |
| 2296 | SINSWLAWYQQKPGKAPKLLIYKASSL | (Human) | (Human) | (Human) | (Human) | | LTGYSGDV | | T | (https://www.nature.co |
| | ESGVPSRFSGSGSGTEFTLTISSLQPDD | | | | | | | | | m/articles/s41591-020- |
| | FATYYCQQYSIYSWTFGQGTKVEIK | | | | | | | | | 0998-x) |

| | | | | | Not | | | | | |
|---|---|---|---|---|---|---|---|---|---|---|
| | Ab | | | Neutral- | Neutral- | | | SEQ | | SEQ |
| | or | | Doesn't | ising | ising | Protein + | | ID | | ID |
| Name | Nb | Binds to | Bind to | Vs | Vs | Epitope | Origin | NO.: | VH or VHH | NO.: |
| CoV2- | Ab | SARS-CoV2 | SARS- | | SARS-CoV1, | S; RBD | B-cells; SARS-CoV2 | 370 | QVQLVESGGGVVQPGRSLRLSCAASGF | 1449 |
| 2299 | | | CoV1 | | SARS-CoV2 | | Human Patient | | SFSSYVMNWVRQAPGKGLEWVAVISY | |
| | | | | | | | | | DGSSKYYADSVKGRFTISRDNSKNTLYLQ | |
| | | | | | | | | | MNSLRAEDTAVYYCARDIDSGYDPTPVF | |
| | | | | | | | | | DYWGQGTLVTVSS | |
| CoV2- | Ab | SARS-CoV2 | SARS- | | SARS-CoV1, | S; non- | B-cells; SARS-CoV2 | 371 | QVQLQESGPGLVKPSGTLSLTCAVSGGS | 1450 |
| 2300 | | | CoV1 | | SARS-CoV2 | RBD | Human Patient | | ISSSNWWTWVRQPPGKGLEWIGEIYHS | |
| | | | | | | | | | GSTNYNPSLKSRVTISVDKSKNQFSLKLSS | |
| | | | | | | | | | VTAADTAVYYCASRWGDYFDSSGAYDS | |
| | | | | | | | | | WGQGTLVTVSS | |
| CoV2- | Ab | SARS-CoV2 | SARS- | | SARS-CoV1, | S; RBD | B-cells; SARS-CoV2 | 372 | EVQLVESGGGLVKPGGSLRLSCAASGFT | 1451 |
| 2304 | | | CoV1 | | SARS-CoV2 | | Human Patient | | FSSYSMNWVRQAPGKGLEWVSCISSSS | |
| | | | | | | | | | SFIYYADSVKGRFTISRDNAKNSLYLQMN | |
| | | | | | | | | | SLRAEDTAVYYCARDPVWVDGELLSGGI | |
| | | | | | | | | | PFDYWGQGTLVTVSS | |
| CoV2- | Ab | SARS-CoV2 | SARS- | | SARS-CoV1, | S; NTD | B-cells; SARS-CoV2 | 373 | QLQLQESGPGLVKPSETLSLTCTVSGGSI | 1452 |
| 2305 | | | CoV1 | | SARS-CoV2 | | Human Patient | | RSSSYYWGWIRQPPGKGLEWIASIYYSG | |
| | | | | | | | | | STYYNSSLKSRVTISVDTSKNQFSLKVNS | |
| | | | | | | | | | MTAADTAVYYCAILWRGSSWADRHYYY | |
| | | | | | | | | | YSMDVWGQGTTVTVSS | |
| CoV2- | Ab | SARS-CoV2 | SARS- | | SARS-CoV1, | S; NTD | B-cells; SARS-CoV2 | 374 | QVQLVESGGGVVQPGRSLRLSCTASGFT | 1453 |
| 2307 | | | CoV1 | | SARS-CoV2 | | Human Patient | | FSSYAMHWVRQAPGKGLEWVALISYD | |
| | | | | | | | | | GNNKYYADSAKGRFTISRDNSKNTLYLQ | |
| | | | | | | | | | MNSLRSEDTAVYYCARDLGRGLDPWG | |
| | | | | | | | | | QGTLVTVSS | |
| CoV2- | Ab | SARS-CoV2 | SARS- | SARS-CoV2 | | S; RBD | B-cells; SARS-CoV2 | 375 | EVQLLESGGGLIQPGGSLRLSCAASGFTF | 1454 |
| 2308 | | | CoV1 | | | | Human Patient | | SNYAMSWVRQAPGKGLEWVSGIISSSG | |
| | | | | | | | | | GATYNADSVRGRFTTSRDNSKNILYLQM | |
| | | | | | | | | | NSLRGEDTAVYYCVKGLFDWFPLWGQ | |
| | | | | | | | | | GTMVTVSS | |
| CoV2- | Ab | SARS-CoV1, | | | SARS-CoV2 | S; non- | B-cells; SARS-CoV2 | 376 | QVQLQESGPGLVKPSQTLSLTCAVSGAS | 1455 |
| 2310 | | SARS-CoV2 | | | | RBC | Human Patient | | ISSGSYYWSWIRQPAGKGLEWIGRIYTS | |
| | | | | | | | | | GNTNYNPSLKSRVTISVDTSKNQFSLKLS | |
| | | | | | | | | | SVTAADTAVYYCATGYIGTYYYYMDVW | |
| | | | | | | | | | GKGTTVTVSS | |
| CoV2- | Ab | SARS-CoV1, | | | SARS-CoV2 | S; RBD | B-cells; SARS-CoV2 | 377 | EVQLVESGGGLVQPGRSLRLSCAASGFT | 1456 |
| 2313 | | SARS-CoV2 | | | | | Human Patient | | FDDYAMHWVRQAPGKGLEWVSGISW | |
| | | | | | | | | | NSGSIGYADSVKGRFTISRDNAKNSLYLQ | |
| | | | | | | | | | MNSLRAEDTALYYCAKVSSITSLLGYYFD | |
| | | | | | | | | | SWGQGTLVTVSS | |
| CoV2- | Ab | SARS-CoV2 | SARS- | | SARS-CoV1, | S; RBD | B-cells; SARS-CoV2 | 378 | QVTLRESGPALVKPTQTLSLTCTFSGFSL | 1457 |
| 2318 | | | CoV1 | | SARS-CoV2 | | Human Patient | | GTSGMCVSWIRQPPGKALEWLARIDW | |
| | | | | | | | | | DDDKYYSTSLKTRLTISKDTSKNQVVLTM | |
| | | | | | | | | | TNMDPVDTATYYCARGVVTYDYWGQG | |
| | | | | | | | | | TLVTVSS | |
| CoV2- | Ab | SARS-CoV1, | | | SARS-CoV2 | S; non- | B-cells; SARS-CoV2 | 379 | QVQLVESGGGVVQPGRSLRLSCAASGF | 1458 |
| 2322 | | SARS-CoV2 | | | | RBC | Human Patient | | TFSNYAMHWVRQAPGKGLDWVAVISY | |
| | | | | | | | | | DGSNRYYAASVKGRFTISRDNSKNTLYL | |
| | | | | | | | | | QMNSLRTEDTAVYFCARGDGYRSQFDP | |
| | | | | | | | | | WGQGTLVTVSS | |
| CoV2- | Ab | SARS-CoV1, | | | SARS-CoV2 | S; non- | B-cells; SARS-CoV2 | 380 | QITFKESGPTLVKPTETLTLTCTFSGFSVS | 1459 |
| 2325 | | SARS-CoV2 | | | | RBC | Human Patient | | TSGEGVGWIRQPPGKALEWLAVIYWD | |
| | | | | | | | | | DDKRYSPSLKSRLTITRDTSKNQVVLTMT | |
| | | | | | | | | | NMDPVDTATYYCAHRLWFRDAFDIWG | |
| | | | | | | | | | QGTTVTVSS | |
| CoV2- | Ab | SARS-CoV1, | | | SARS-CoV2 | S; RBD | B-cells; SARS-CoV2 | 381 | EVQLLESGGGLVQPGGSLRLSCAASGFT | 1460 |
| 2329 | | SARS-CoV2 | | | | | Human Patient | | FNNYAMSWVRQAPGKGLEWVSAIGGS | |
| | | | | | | | | | GGSTYYADSVKGRFTVSRDNSENTLYLQ | |
| | | | | | | | | | MSSLRAEDTAVYYCARVEGDWLLGGPY | |
| | | | | | | | | | YHYYGMDVWGQGTTVTVSS | |
| CoV2- | Ab | SARS-CoV1, | | | SARS-CoV2 | S; RBD | B-cells; SARS-CoV2 | 382 | QLQLQESGPGLVKPSETLSLTCTVSGGSI | 146: |
| 2331 | | SARS-CoV2 | | | | | Human Patient | | SSSSYYWGWIRQPPGNGLEWIGSIYYSG | |
| | | | | | | | | | STYYNPSLKGRVSISVDTSKNQFSLKLSSV | |
| | | | | | | | | | TAADTAVYYCARILVIFTLNWFDPWGQ | |
| | | | | | | | | | GTLVTVSS | |
| CoV2- | Ab | SARS-CoV1, | | | SARS-CoV2 | S; non- | B-cells; SARS-CoV2 | 383 | EVQLVESGGGLVQPGGSLRLSCAASGFT | 1462 |
| 2333 | | SARS-CoV2 | | | | RBD | Human Patient | | FSIYWMSWVRQAPGKGLQWVANIKQ | |
| | | | | | | | | | DASEKYYVDSVKGRFTISRDNAKNSLYLQ | |
| | | | | | | | | | MNSLRAEDTAVYYCARLGGSSWHFDY | |
| | | | | | | | | | WGQGTLVTVSS | |

| | | | | | | SEQ | | SEQ | | |
|---|---|---|---|---|---|---|---|---|---|---|
| | | Heavy V | Heavy J | Light V | Light J | ID | | ID | | |
| Name | VL | Gene | Gene | Gene | Gene | NO.: | CDRH3 | NO.: | CDRL3 | Sources |
| CoV2- | DIQMTQSPSSLSACVGDRVTITCRASQ | IGHV3-30- | IGHJ4 | IGKV1-39 | IGKJ1 | 2458 | ARDIDSGYDP | 3660 | QQSYSTP | Seth Zost et al., 2020 |
| 2299 | SISSYLNWYQQKPGKGPKLLIYAASSLQ | 3 | (Human) | (Human) | (Human) | | TPVFDY | | WT | (https://www.nature.co |
| | SGVPSRFSGSGSGTDFTLTISSLQPEDF | (Human) | | | | | | | | m/articles/s41591-020- |
| | ATYYCQQSYSTPWTFGQGTKVEIK | | | | | | | | | 0998-x) |
| CoV2- | DIQMTQSPSSVSASVGDRVTITCRASQ | IGHV4-4 | IGHJ4 | IGKV1-12 | IGKJ4 | 2459 | ASRWGDYFD | 3661 | QQANSLPL | Seth Zost et al., 2020 |
| 2300 | GISSWLAWYQQKPGKAPKLLIYAASSL | (Human) | (Human) | (Human) | (Human) | | SSGAYDS | | T | (https://www.nature.co |
| | QRGVPSRFSGSGSGTDFTLTISSLQPE | | | | | | | | | m/articles/s41591-020- |
| | DFATYYCQQANSLPLTFGGGTKVEVK | | | | | | | | | 0998-x) |
| CoV2- | QSVLTQPPSASGTPGQRVTISCSGSSS | IGHV3-21 | IGHJ4 | IGLV1-44 | IGLJ2 | 2460 | ARDPVWVDG | 3662 | AAWDDSL | Seth Zost et al., 2020 |
| 2304 | NIESNSVNWYQQLPGTAPKLLIYSNN | (Human) | (Human) | (Human) | (Human) | | ELLSGGIPFDY | | NGVV | (https://www.nature.co |
| | QRPSGVPDRFSGSKSGTSASLAISGLQ | | | | | | | | | m/articles/s41591-020- |
| | SEDEADYYCAAWDDSLNGVVFGGGT | | | | | | | | | 0998-x) |
| | KLTVL | | | | | | | | | |
| CoV2- | QSVLTQPPSASGTPGQRVTISCSGSTS | IGHV4-39 | IGHJ6 | IGLV1-44 | IGLJ3 | 2461 | AILWRGSSW | 3663 | AAWDDSL | Seth Zost et al., 2020 |
| 2305 | NIGSNTVNWYQQLPGTAPKLLIYSNN | (Human) | (Human) | (Human) | (Human) | | ADRHYYYYSM | | NGWV | (https://www.nature.co |
| | QRPSGVPDRFSGSKSGPSASLAISGLQ | | | | | | DV | | | m/articles/s41591-020- |
| | SVDEADYYCAAWDDSLNGWVFGGG | | | | | | | | | 0998-x) |
| | TKLTVL | | | | | | | | | |
| CoV2- | SYELTQSPSVSVSPGQTASITCSGDKLG | IGHV3-30- | IGHJ5 | IGLV3-1 | IGLJ3 | 2462 | ARDLGRGLDP | 3664 | QAWDSST | Seth Zost et al., 2020 |
| 2307 | DKYACWYQQRPGQSPVLVIYQDSQR | 3 (Human) | (Human) | (Human) | (Human) | | | | AV | (https://www.nature.co |
| | PSGIPERFSGSNSGNTATLTISGTQAM | | | | | | | | | m/articles/s41591-020- |
| | DEADYYCQAWDSSTAVFGGGTKLTVL | | | | | | | | | 0998-x) |
| CoV2- | DIVMTQSPATLSVSPGERAILSCRASQ | IGHV3-23 | IGHJ3 | IGKV3-15 | IGKJ1 | 2463 | VKGLFDWFPL | 3665 | HQYNNWP | Seth Zost et al., 2020 |
| 2308 | SVRSNLAWYQQKPGQAPRLLISGAST | (Human) | (Human) | (Human) | (Human) | | | | QT | (https://www.nature.co |
| | RATAIPARFSGSGSGTEFTLTITSLQSED | | | | | | | | | m/articles/s41591-020- |
| | CAVYYCHQYNNWPQTFGQGTKVEIK | | | | | | | | | 0998-x) |
| CoV2- | DIQMTQSPSSLSASVGDRVTITCRASQ | IGHV4-61 | IGHJ6 | IGKV1-39 | IGKJ4 | 2464 | ATGYIGTYYY | 3666 | QQSYSTLT | Seth Zost et al., 2020 |
| 2310 | SISTYLNWYQQKPGKAPKLLIYAASSLQ | (Human) | (Human) | (Human) | (Human) | | YMDV | | | (https://www.nature.co |
| | SGVPSRFSGSGSGTDFTLTISSLQPEDF | | | | | | | | | m/articles/s41591-020- |
| | ATYHCQQSYSTLTFGGGTKVEIK | | | | | | | | | 0998-x) |
| CoV2- | EIVLTQSPATLSLSPGERATLSCRASQS | IGHV3-9 | IGHJ4 | IGKV3-11 | IGKJ4 | 2465 | AKVSSITSLL | 3667 | QHRSNWP | Seth Zost et al., 2020 |
| 2313 | VSSYLAWYQQKPGQAPRLLIYDASNR | (Human) | (Human) | (Human) | (Human) | | GYYFDS | | PRLT | (https://www.nature.co |
| | ATGIPARFSGSGSGTDFTLTISSLEPEDF | | | | | | | | | m/articles/s41591-020- |
| | AVYYCQHRSNWPPRLTFGGGTKVEIK | | | | | | | | | 0998-x) |
| CoV2- | DIQMTQSPSSLSASVGDRVTITCRASQ | IGHV2-70 | IGHJ4 | IGKV1-39 | IGKJ5 | 2466 | ARGVVTYDY | 3668 | QQSYSTPG | Seth Zost et al., 2020 |
| 2318 | SIAGYLNWYQQKPGKAPKLLIYGTTSL | (Human) | (Human) | (Human) | (Human) | | | | T | (https://www.nature.co |
| | QSGVPVRFSGSGSGTDFTLTISSLQPE | | | | | | | | | m/articles/s41591-020- |
| | DFATYYCQQSYSTPGTFGQGTRLEIK | | | | | | | | | 0998-x) |
| CoV2- | EIVLTQSPGTLSLSPGERATLSCRASQS | IGHV3-30 | IGHJ5 | IGKV3-20 | IGKJ2 | 2467 | ARGDGYRSQ | 3669 | QQYGSSYT | Seth Zost et al., 2020 |
| 2322 | VSSSYLAWYQQKPGQAPRLLIYGASSR | (Human) | (Human) | (Human) | (Human) | | FDP | | | (https://www.nature.co |
| | ATGIPDRFSGSGSGTDFTLTISRLEPED | | | | | | | | | m/articles/s41591-020- |
| | FAVYYCQQYGSSYTFGQGTKLEIK | | | | | | | | | 0998-x) |
| CoV2- | DIQMTQSPSSLSASVGDRVTITCRARQ | IGHV2-5 | IGHJ3 | IGKV1-39 | IGKJ1 | 2468 | AHRLWFRDA | 3670 | QQTYSTF | Seth Zost et al., 2020 |
| 2325 | SISNYLNWYQQKPGKAPKLLIYAASSL | (Human) | (Human) | (Human) | (Human) | | FDI | | WT | (https://www.nature.co |
| | HSGVPSRFSGSGSGTDFTLTISSLQPED | | | | | | | | | m/articles/s41591-020- |
| | FATYYCQQTYSTFWTFGQGTNVEIK | | | | | | | | | 0998-x) |
| CoV2- | QSVLTQPPSASGTPGQRVTISCSGSSS | IGHV3-23 | IGHJ6 | IGLV1-47 | IGLJ3 | 2469 | ARVEGDWLL | 3671 | AAWDDSL | Seth Zost et al., 2020 |
| 2329 | NIGSNYVYWYQQLPGTAPKLLISRNN | (Human) | (Human) | (Human) | (Human) | | GGPYYHYYG | | SSWV | (https://www.nature.co |
| | QRPSGVPDRFSGSKSGTSASLAISGLRS | | | | | | MDV | | | m/articles/s41591-020- |
| | EDEADYYCAAWDDSLSSWVFGGGTK | | | | | | | | | 0998-x) |
| | LTVL | | | | | | | | | |
| CoV2- | NFMLTQPHSVSESPGKTVTISCTGSSG | IGHV4-39 | IGHJ5 | IGLV6-57 | IGLJ2 | 2470 | ARILVIFTLN | 3672 | QSYDSGNP | Seth Zost et al., 2020 |
| 233: | SIASNYVQWYQQRPGSAPTTVIYEDN | (Human) | (Human) | (Human) | (Human) | | WFDP | | | (https://www.nature.co |
| | QRPSGVPDRFSGSIDSSSNSASLTISGL | | | | | | | | | m/articles/s41591-020- |
| | KTEDEADYYCQSYDSGNPIFGGGTKLT | | | | | | | | | 0998-x) |
| | VL | | | | | | | | | |
| CoV2- | SYELTQPPSVSVSPGQTASITCSGDKLG | IGHV3-7 | IGHJ4 | IGLV3-1 | IGLJ3 | 2471 | ARLGGSSWH | 3673 | QAWSSST | Seth Zost et al., 2020 |
| 2333 | DKYSSWYQQKPGQSPVLVIYEDTKRPS | (Human) | (Human) | (Human) | (Human) | | FDY | | AV | (https://www.nature.co |
| | GIPERFSGSNSGNTATLTISGTQAMDE | | | | | | | | | m/articles/s41591-020- |
| | ADYYCQAWSSSTAVFGGGTKLTVL | | | | | | | | | 0998-x) |

| | | | | | Not | | | | | |
|---|---|---|---|---|---|---|---|---|---|---|
| | Ab | | | Neutral- | Neutral- | | | SEQ | | SEQ |
| | or | | Doesn't | ising | ising | Protein + | | ID | | ID |
| Name | Nb | Binds to | Bind to | Vs | Vs | Epitope | Origin | NO.: | VH or VHH | NO.: |
| CoV2- | Ab | SARS-CoV2 | SARS- | | SARS-CoV1, | S; NTD | B-cells; SARS-CoV2 | 384 | QLQLQESGPGLVKPSETLSLTCTVSGGPI | 1463 |
| 2335 | | | CoV1 | | SARS-CoV2 | | Human Patient | | SSSRYYWGWIRQPPGKGLEWIGSIYYSG | |
| | | | | | | | | | STYYNPSLKSRVTISVDTSKNQFSLKLNSV | |
| | | | | | | | | | TAADTAVYYCARHDGSGEMDTITWGPI | |
| | | | | | | | | | YYYMDVWGKGTTVTVSS | |
| CoV2- | Ab | SARS-CoV1, | | | SARS-CoV2 | S; non- | B-cells; SARS-CoV2 | 385 | QITFKESGPTLVKPTETLTLTCTFSGFSVS | 1464 |
| 2337 | | SARS-CoV2 | | | | RBD | Human Patient | | TSGEGVGWIRQPPGKALEWLAVIYWD | |
| | | | | | | | | | DDKRYSPSLKSRLTITRDTSKNQVVLTMT | |
| | | | | | | | | | NMDPVDTATYYCAHRLWFRDAFDIWG | |
| | | | | | | | | | QGTTVTVSS | |
| CoV2- | Ab | SARS-CoV1, | | | SARS-CoV2 | S; non- | B-cells; SARS-CoV2 | 386 | QVQLVQSGAEVKKPGASVKVSCKASGY | 1465 |
| 2340 | | SARS-CoV2 | | | | RBD | Human Patient | | TFTSYGMHWVRQAPGQRLEWMGWIN | |
| | | | | | | | | | VGNGNTKYSQRFQGRVTITRDTSASTAY | |
| | | | | | | | | | MELSSLRSEDTAVYYCAMGPSAFSWLD | |
| | | | | | | | | | PWGQGTLVTVSS | |
| CoV2- | Ab | SARS-CoV1, | | | SARS-CoV2 | S; non- | B-cells; SARS-CoV2 | 387 | QVQLAESGGGVVQPGRSLRLSCAASGF | 1466 |
| 2341 | | SARS-CoV2 | | | | RBD | Human Patient | | TFSSYAMHWVRQAPGKGLEWVAVISY | |
| | | | | | | | | | DGSNKYYADSVKGRFTISRDNSKNTLYL | |
| | | | | | | | | | QMNSLRAEDTAVYYCARSTSGSYYYGM | |
| | | | | | | | | | DVWGQGTTVTVSS | |
| CoV2- | Ab | SARS-CoV1, | | | SARS-CoV2 | S; RBD | B-cells; SARS-CoV2 | 388 | QITLKESGPTLVKPTQTLTLTCTFSGFSLN | 1467 |
| 2342 | | SARS-CoV2 | | | | | Human Patient | | TSGVGVGWIRQPPGKALEWLALIYWD | |
| | | | | | | | | | DDKRYNPSLKSRLTITKDTSKNQVVLTM | |
| | | | | | | | | | TNMDPVDTATYYCAHRPPSYHGWCYF | |
| | | | | | | | | | DYWGQGNLVTVSS | |
| CoV2- | Ab | SARS-CoV1, | | | SARS-CoV2 | S; non- | B-cells; SARS-CoV2 | 389 | QVQVVQSGAEVKKPGASVKVSCKASGY | 1468 |
| 2343 | | SARS-CoV2 | | | | RBD | Human Patient | | TFKNYGISWVRQAPGQGLEWMGWISA | |
| | | | | | | | | | YTGNTNYAQKFQGRMTMTTDTSTGTG | |
| | | | | | | | | | YMELRSLRSDDTAVYYCARVQRRRLDY | |
| | | | | | | | | | WGQGTLVIVSS | |
| CoV2- | Ab | SARS-CoV2 | SARS- | | SARS-CoV1, | S; NTD | B-cells; SARS-CoV2 | 390 | QVQLQQWGAGLLKPSETLSLTCAVYGG | 1469 |
| 2346 | | | CoV1 | | SARS-CoV2 | | Human Patient | | SFSGHYWSWIRQPPGKGLEWIGEINHS | |
| | | | | | | | | | GSTNYNPSLKSRVTISVDTSKNQFSLKLSS | |
| | | | | | | | | | VTAADTAVYYCARPPQAARIHYYYYMD | |
| | | | | | | | | | VWGKGTTVTVSS | |
| CoV2- | Ab | SARS-CoV2 | SARS- | | SARS-CoV1, | S; RBD | B-cells; SARS-CoV2 | 391 | EVQLVQSGAEVKKPGESLKISCKGSGYSF | 1470 |
| 2351 | | | CoV1 | | SARS-CoV2 | | Human Patient | | TSYWIGWVRQMPGKGLEWMGIIYPGD | |
| | | | | | | | | | SDTTYNPSFQGQVTISADKSLTTAFLHW | |
| | | | | | | | | | SSLKASDTAIYYCARRFYGPSSFDYWGQ | |
| | | | | | | | | | GTLVIVSS | |
| CoV2- | Ab | SARS-CoV2 | SARS- | | SARS-CoV1, | S; RBD | B-cells; SARS-CoV2 | 392 | QVQLVQSGAEVKRPGASMNISCKASGY | 1471 |
| 2352 | | | CoV1 | | SARS-CoV2 | | Human Patient | | NFNNNYIYWVRQAPGQGLEWMGVVN | |
| | | | | | | | | | PTGGGTAYAQGFQDRVTITSDTPRNTVY | |
| | | | | | | | | | LGVTGLHSEDTAVYFCARGGEWRIVPG | |
| | | | | | | | | | GRDYFDYWGQGTLVTVSA | |
| CoV2- | Ab | SARS-CoV2 | SARS- | SARS-CoV2 | | S; RBD | B-cells; SARS-CoV2 | 393 | EVQLVQSGAEVKKPGESLKISCKGFGYN | 1472 |
| 2353 | | | CoV1 | | | | Human Patient | | FTNYWIGWVRQMPGKGLEWMGIIYPG | |
| | | | | | | | | | DSETRNSPSFQGQVTISADKSMSTAYLQ | |
| | | | | | | | | | WSSLKASDTAMYYCARLGVSKYCSGGR | |
| | | | | | | | | | CLSGGSNWFDPWGQGTLVTVSS | |
| CoV2- | Ab | SARS-CoV1, | | SARS-CoV2 | | S; RBD | B-cells; SARS-CoV2 | 394 | EVHLVGSGGGLIQPGGSLRLSCAASGFT | 1473 |
| 2354 | | SARS-CoV2 | | | | | Human Patient | | VSSNFMSWVRQAPGKGLEWVSIIHNG | |
| | | | | | | | | | GDSYYTDSVKGRFTISRDNSKNTLYLQM | |
| | | | | | | | | | NNLRAEDTAVYYCASSSWLRGAFDIWG | |
| | | | | | | | | | QGTMVTVSS | |
| CoV2- | Ab | SARS-CoV2 | SARS- | SARS-CoV2 | | S; RBD | B-cells; SARS-CoV2 | 395 | QMQLVQSGPEVKKPGTSVKVSCKTSGF | 1474 |
| 2355 | | | CoV1 | | | | Human Patient | | TFTSSAIQWVRQARGQRLEWIGWIVVG | |
| | | | | | | | | | SGNTNYAQKFQERVTITRDMSTSTAYM | |
| | | | | | | | | | ELSSLRSEDTAVYYCAAPHCNRTSCYDAF | |
| | | | | | | | | | DLWGQGTMVTVSS | |
| CoV2- | Ab | SARS-CoV1, | | | SARS-CoV2 | S; RBD | B-cells; SARS-CoV2 | 396 | EVQLVESGGDLVKPGRSLRLSCSASGFTF | 1475 |
| 2357 | | SARS-CoV2 | | | | | Human Patient | | GDYTMSWFRQAPGKGLEWVAFIRSKAY | |
| | | | | | | | | | GGTTEYAASVIGRFTISRDDSKSIAYLQM | |
| | | | | | | | | | NSLKSEDTAVYYCSRVRGSFYGSVGKNY | |
| | | | | | | | | | GMDVWGQGTTVTVSS | |
| CoV2- | Ab | SARS-CoV1, | | | SARS-CoV2 | S; RBD | B-cells; SARS-CoV2 | 397 | QVQLVESGGGVVQPGRSLRLSCAASGF | 1476 |
| 2358 | | SARS-CoV2 | | | | | Human Patient | | SFSSYVMNWVRQAPGKGLEWVAVISY | |
| | | | | | | | | | DGSSKYYADSVKGRFTISRDNSKNTLYLQ | |
| | | | | | | | | | MNSLRAEDTAVYYCARDIDSGYDPTPVF | |
| | | | | | | | | | DYWGQGTLVTVSS | |

| | | | | | | SEQ | | SEQ | | |
|---|---|---|---|---|---|---|---|---|---|---|
| | | Heavy V | Heavy J | Light V | Light J | ID | | ID | | |
| Name | VL | Gene | Gene | Gene | Gene | NO.: | CDRH3 | NO.: | CDRL3 | Sources |
| CoV2- | QSALTQPASVSGSPGQSITISCTGTSSD | IGHV4-39 | IGHJ6 | IGLV2-14 | IGLJ2 | 2472 | ARHDGSGEM | 3674 | SSYTSSTLN | Seth Zost et al., 2020 |
| 2335 | VGGYNYVSWYQQHPGKAPKLMIYYV | (Human) | (Human) | (Human) | (Human) | | DTITWGPIYYY | | VL | (https://www.nature.co |
| | SNRPSGVSNRFSGSKSGNTASLTISGL | | | | | | MDV | | | m/articles/s41591-020- |
| | QAEDEADYYCSSYTSSTLNVLFGGGTK | | | | | | | | | 0998-x) |
| | LTVL | | | | | | | | | |
| CoV2- | DIQMTQSPSSLSASVGDRVTITCRARQ | IGHV2-5 | IGHJ3 | IGKV1-39 | IGKJ5 | 2473 | AHRLWFRDA | 3675 | QQSYSTPG | Seth Zost et al., 2020 |
| 2337 | SISNYLNWYQQKPGKAPKLLIYAASSL | (Human) | (Human) | (Human) | (Human) | | FDI | | T | (https://www.nature.co |
| | HSGVPSRFSGSGSGTDFTLTISSLQPED | | | | | | | | | m/articles/s41591-020- |
| | FATYYCQQSYSTPGTFGQGTRLEIK | | | | | | | | | 0998-x |
| CoV2- | QSVLTQPPSVSGAPGQRVTISCTGSSS | IGHV1-3 | IGHJ5 | IGLV1-40 | IGLJ1 | 2474 | AMGPSAFSW | 3676 | QSYDSSLS | Seth Zost et al., 2020 |
| 2340 | NIGAGYDVHWYQHLPGTAPKLLIYGN | (Human) | (Human) | (Human) | (Human) | | LDP | | GWSV | (https://www.nature.co |
| | SNRPSGVPDRFSGSKSGTSASLAITGL | | | | | | | | | m/articles/s41591-020- |
| | QAEDEADYYCQSYDSSLSGWSVFGTG | | | | | | | | | 0998-x) |
| | TKVTVL | | | | | | | | | |
| CoV2- | QSALTQPASVSGSPGQSITISCTGTSSD | IGHV3-30- | IGHJ6 | IGLV2-14 | IGLJ1 | 2475 | ARSTSGSYYY | 3677 | SSYTSSSTL | Seth Zost et al., 2020 |
| 2341 | VGDYNYVSWYQQHPGKAPKLMIYDV | 3 | (Human) | (Human) | (Human) | | GMDV | | LYV | (https://www.nature.co |
| | SNRPSGVSNRFSGSKSGNTASLTISGL | (Human) | | | | | | | | m/articles/s41591-020- |
| | QAEDEAEYYCSSYTSSSTLLYVFGTGTK | | | | | | | | | 0998-x) |
| | VTVL | | | | | | | | | |
| CoV2- | DIQMTQSPSSLSASVGDRVTITCRASQ | IGHV2-5 | IGHJ4 | IGKV1-39 | IGKJ2 | 2476 | AHRPPSYHG | 3678 | QQSYSTH | Seth Zost et al., 2020 |
| 2342 | SISIYLNWYQQKPGKAPKLLIYAASTLQ | (Human) | (Human) | (Human) | (Human) | | WCYFDY | | MST | (https://www.nature.co |
| | SGVPSRFSGSGSGTDFTLTISSLQPEDF | | | | | | | | | m/articles/s41591-020- |
| | ATYYCQQSYSTHMSTFGQGTKLEIK | | | | | | | | | 0998-x) |
| CoV2- | DIVVTQTPLSLSVTPGQPASISCKSSET | IGHV1-18 | IGHJ4 | IGKV2D-29 | IGKJ5 | 2477 | ARVQRRRLDY | 3679 | MQSIQLA | Seth Zost et al., 2020 |
| 2343 | LLHSDGKTYLSWYLQKPGQPPQLLIYEV | (Human) | (Human) | (Human) | (Human) | | | | | (https://www.nature.co |
| | SNRFSGVPDRFSGSGSGTDFTLKIGRV | | | | | | | | | m/articles/s41591-020- |
| | EAEDVGLYYCMQSIQLAFGQGTRLEIE | | | | | | | | | 0998-x) |
| CoV2- | EIVMTQSPATLSVSPGERATLSCRASQ | IGHV4-34 | IGHJ6 | IGKV3-15 | IGKJ4 | 2478 | ARPPQAARIH | 3680 | QQYNYWP | Seth Zost et al., 2020 |
| 2346 | SVSSNLAWYQQKPGQAPRLLIYGAST | (Human) | (Human) | (Human) | (Human) | | YYYYMDV | | PLT | (https://www.nature.co |
| | RATGIPARFSGSGSGTEFTLTISSLQSE | | | | | | | | | m/articles/s41591-020- |
| | DFAVYYCQQYNYWPPLTFGGGTKVEI | | | | | | | | | 0998-x) |
| | K | | | | | | | | | |
| CoV2- | SSELTQDPAVSVALGQTVTITCQGDSL | IGHV5-51 | IGHJ4 | IGLV3-19 | IGLJ2 | 2479 | ARRFYGPSSF | 3681 | SSGDSSTD | Seth Zost et al., 2020 |
| 2351 | RSHYASWYKVKPGQAPLLVIYGRNNR | (Human) | (Human) | (Human) | (Human) | | DY | | HHVV | (https://www.nature.co |
| | PSGIPDRFSGSRSGNTASLTITGAQVD | | | | | | | | | m/articles/s41591-020- |
| | DEADYYCSSGDSSTDHHVVFAGGTKL | | | | | | | | | 0998-x) |
| | AVV | | | | | | | | | |
| CoV2- | DMEVTQFPSSLSASIGDRVTITCRATQ | IGHV1-46 | IGHJ4 | IGKV1-39 | IGKJ4 | 2480 | ARGGEWRIV | 3682 | HQSYGVPI | Seth Zost et al., 2020 |
| 2352 | SISTYLNWYQQKPGKAPNLLIYSASHL | (Human) | (Human) | (Human) | (Human) | | PGGRDYFDY | | T | (https://www.nature.co |
| | QRGVPARFSGSGSGTEFTLTITTLQPE | | | | | | | | | m/articles/s41591-020- |
| | DVGTYYCHQSYGVPITFGGGTKVDIK | | | | | | | | | 0998-x) |
| CoV2- | EIVMTQSPATLSVSPGERATLSCRASQ | IGHV5-51 | IGHJ5 | IGKV3-15 | IGKJ2 | 2481 | ARLGVSKYCS | 3683 | QQYNNWP | Seth Zost et al., 2020 |
| 2353 | SVSSNLAWYQQKPGQAPRLLIYGAST | (Human) | (Human) | (Human) | (Human) | | GGRCLSGGS | | PMYT | (https://www.nature.co |
| | RATGIPARFSGSGSGTEFTLTISSLQSE | | | | | | NWFDP | | | m/articles/s41591-020- |
| | DFAVYYCQQYNNWPPMYTFGQGTKL | | | | | | | | | 0998-x) |
| | EIK | | | | | | | | | |
| CoV2- | NFMLTQPHSVSESPGKTVTISCTGSSG | IGHV3-53 | IGHJ3 | IGLV6-57 | IGLJ2 | 2482 | ASSSWLRGAF | 3684 | QSYDSSKY | Seth Zost et al., 2020 |
| 2354 | SIASNYVQWYQQRPGSAPTTVIYEDN | (Human) | (Human) | (Human) | (Human) | | DI | | VV | (https://www.nature.co |
| | QRPSGVPDRFSGSIDSSSNSASLTISGL | | | | | | | | | m/articles/s41591-020- |
| | KTEDEADYYCQSYDSSKYVVFGGGTKL | | | | | | | | | 0998-x) |
| | TVL | | | | | | | | | |
| CoV2- | EIVLTQSPGTLSLSPGERATLSCRASQS | IGHV1-58 | IGHJ3 | IGKV3-20 | IGKJ1 | 2483 | AAPHCNRTSC | 3685 | QQYGSSP | Seth Zost et al., 2020 |
| 2355 | VSSSYLGWYQQKPGQAPRLLIYGASSR | (Human) | (Human) | (Human) | (Human) | | YDAFDL | | WT | (https://www.nature.co |
| | ATGIPDRFSGSGSGTDFTLTISRLEPED | | | | | | | | | m/articles/s41591-020- |
| | FAVYYCQQYGSSPWTFGQGTKVEIK | | | | | | | | | 0998-x) |
| CoV2- | DIVMTQSPLSLPVTPGEPASISCRSSQS | IGHV3-49 | IGHJ6 | IGKV2-28 | IGKJ2 | 2484 | SRVRGSFYGS | 3686 | MQALQTP | Seth Zost et al., 2020 |
| 2357 | LLHSNGYNYLDWYLQKPGQSPQLLIYL | (Human) | (Human) | (Human) | (Human) | | VGKNYGMDV | | LYT | (https://www.nature.co |
| | GSTRASGVPDRFSGSGSGTDFTLKISR | | | | | | | | | m/articles/s41591-020- |
| | VEAEDVGVYYCMQALQTPLYTFGQGT | | | | | | | | | 0998-x) |
| | KLEIK | | | | | | | | | |
| CoV2- | DIQMTQSPSSLSACVGDRVTITCRASQ | IGHV3-30- | IGHJ4 | IGKV1-39 | IGKJ5 | 2485 | ARDIDSGYDP | 3687 | QQSYSSLSI | Seth Zost et al., 2020 |
| 2358 | SISSYLNWYQQKPGKGPKLLIYAASSLQ | 3 | (Human) | (Human) | (Human) | | TPVFDY | | T | (https://www.nature.co |
| | SGVPSRFSGSGSGTDFTLTISSLQPEDF | (Human) | | | | | | | | m/articles/s41591-020- |
| | ATYYCQQSYSSLSITFGQGTRLEIK | | | | | | | | | 0998-x) |

| | | | | | Not | | | | | |
|---|---|---|---|---|---|---|---|---|---|---|
| | Ab | | | Neutral- | Neutral- | | | SEQ | | SEQ |
| | or | | Doesn't | ising | ising | Protein + | | ID | | ID |
| Name | Nb | Binds to | Bind to | Vs | Vs | Epitope | Origin | NO.: | VH or VHH | NO.: |
| CoV2- | Ab | SARS-CoV1, | | | SARS-CoV2 | S; non- | B-cells; SARS-CoV2 | 398 | QVQLVQSGAEVKKPGSSVKVSCKASGG | 1477 |
| 2367 | | SARS-CoV2 | | | | RBD | Human Patient | | TFSSYAISWVRQAPGQGLEWMGGIIPIF | |
| | | | | | | | | | GAANYAQNFQGRVTITADESTSTGYMQ | |
| | | | | | | | | | LSSLRFEDTAVYYCARTSHYDSSGSYFEY | |
| | | | | | | | | | WGQGTLVTVSS | |
| CoV2- | Ab | SARS-CoV2 | SARS- | | SARS-CoV1, | S; non- | B-cells; SARS-CoV2 | 399 | EVQLVQSGAEVKKPGESLKISCKGSGYSF | 1478 |
| 2368 | | | CoV1 | | SARS-CoV2 | RBD | Human Patient | | TTYWIGWVRQMPGKGLEWMGIIYPGD | |
| | | | | | | | | | SDTRYSPSFQGQVTISADKSISTAYLQWS | |
| | | | | | | | | | SLKASDTAMYYCARRRGGIGIEYGMDV | |
| | | | | | | | | | WGQGTTVTVSS | |
| CoV2- | Ab | SARS-CoV2 | SARS- | | SARS-CoV1, | S; non- | B-cells; SARS-CoV2 | 400 | QVQLVESGGGVVQPGRSLRLSCAASGF | 1479 |
| 2369 | | | CoV1 | | SARS-CoV2 | RBD | Human Patient | | TFSSYAMHWVRQAPGKGLEWVADISY | |
| | | | | | | | | | DGSEKYYADSVKGRFTIYRDNSKNTLYLQ | |
| | | | | | | | | | MNSLRAEDTAVYYCAKDFGGDNTAMV | |
| | | | | | | | | | EYFFDFWGQGTLVTVSS | |
| CoV2- | Ab | SARS-CoV2 | SARS- | | SARS-CoV1, | S; RBD | B-cells; SARS-CoV2 | 401 | QVQLQESGPGLVKPSETLSLTCTVSGGS | 1480 |
| 2370 | | | CoV1 | | SARS-CoV2 | | Human Patient | | VSSGSYYWSWIRQPPGKGLECIGYIYYSG | |
| | | | | | | | | | SSNYNPSLKSRVTISVDTSKNQFSLKMSS | |
| | | | | | | | | | VTAADTAVYYCAGSPVPPTIVGASYWG | |
| | | | | | | | | | QGTLVTDSS | |
| CoV2- | Ab | SARS-CoV1, | | | SARS-CoV2 | S; non- | B-cells; SARS-CoV2 | 402 | QVQLVESGGGVVQPGRSLRLSCAASGF | 1481 |
| 2371 | | SARS-CoV2 | | | | RBD | Human Patient | | TFSNYGMHWVRQAPGKGLEWVAVISY | |
| | | | | | | | | | DGTNKYYADSVKGRFTISRDNSKNTLYL | |
| | | | | | | | | | QMNSLRADDTAVYYCAKGRGNYLTFFD | |
| | | | | | | | | | SWGQGTLVTVSS | |
| CoV2- | Ab | SARS-CoV2 | SARS- | | SARS-CoV1, | S; non- | B-cells; SARS-CoV2 | 403 | EVQLVESGGGLVQPGGSLRLSCAASGLT | 1482 |
| 2373 | | | CoV1 | | SARS-CoV2 | RBD | Human Patient | | VSSNYMSWVRQAPGKGLEWVSVIYSG | |
| | | | | | | | | | GSTYYADSVKGRFTISGDNSKNTLYLQM | |
| | | | | | | | | | NSLRVDDTAVYYCARDPGSRYSGGWYD | |
| | | | | | | | | | YYYAMDVWGQGTTVTVSS | |
| CoV2- | Ab | SARS-CoV2 | SARS- | | SARS-CoV1, | S; non- | B-cells; SARS-CoV2 | 404 | EVQLVQSGAEVKKPGESLKISCKGSGYSF | 1483 |
| 2378 | | | CoV1 | | SARS-CoV2 | RBD | Human Patient | | PTYWIGWVRQMPGKGLEWMGIIYPGD | |
| | | | | | | | | | SDTRYGPSFQGQVTISADKSISTAYLQWS | |
| | | | | | | | | | SLKASDTAMYYCARRDTDFDYWGQGTL | |
| | | | | | | | | | VTVSS | |
| CoV2- | Ab | SARS-CoV2 | SARS- | SARS-CoV2 | | S; RBD | B-cells; SARS-CoV2 | 405 | QMQLVQSGPEVKKPGTSVKVSCKASGF | 1484 |
| 2381 | | | CoV1 | | | | Human Patient | | TFTSSAVQWVRQARGQRLEWIGWIAV | |
| | | | | | | | | | GSGNTNYAQKFQERVSITRDMSTSTAY | |
| | | | | | | | | | MELSSLRSEDTAVYYCAAPYCSRTSCHD | |
| | | | | | | | | | AFDIWGQGTKVTVSS | |
| CoV2- | Ab | SARS-CoV1, | | | SARS-CoV2 | S; RBD | B-cells; SARS-CoV2 | 406 | QVQLVESGGGVVQPGRSLRLSCVASGF | 1485 |
| 2382 | | SARS-CoV2 | | | | | Human Patient | | TFSSYGMHWVRQAPGKGLEWVAVISF | |
| | | | | | | | | | DGSNKYYADSVKGRFTISRDNSKNTLYL | |
| | | | | | | | | | QMNSLRAEDTAVFYCAKDLPPYASGWY | |
| | | | | | | | | | EGGFDYWGRGTQVTVSS | |
| CoV2- | Ab | SARS-CoV2 | SARS- | | SARS-CoV1, | S; non- | B-cells; SARS-CoV2 | 407 | QVQLVESGGGVVQPGRSLRLSCAASGF | 1486 |
| 2383 | | | CoV1 | | SARS-CoV2 | RBD | Human Patient | | TFSSYGMHWVRQAPGKGLEWVAVVSY | |
| | | | | | | | | | DGSNKYYTDSVKGRFTISRDNSKNTLFLQ | |
| | | | | | | | | | MIGLREEDTAVYYCAQGRGGYYSPFDD | |
| | | | | | | | | | WGQGTLVTVSS | |
| CoV2- | Ab | SARS-CoV2 | SARS- | | SARS-CoV1, | S; NTD | B-cells; SARS-CoV2 | 408 | QVTLKESGPVLVKPTETLTLTCTVSGFSLS | 1487 |
| 2384 | | | CoV1 | | SARS-CoV2 | | Human Patient | | NARMGVSWIRQPPGKALEWLAHIFSG | |
| | | | | | | | | | DEKSYSTSLKSRLTISKDTSKSQVVLTMT | |
| | | | | | | | | | NMDPLDTATYYCARTTWGTWIQAWYF | |
| | | | | | | | | | DIWGRGTLVTVSS | |
| CoV2- | Ab | SARS-CoV2 | SARS- | | SARS-CoV1, | S; non- | B-cells; SARS-CoV2 | 409 | QVQLVESGGGVVQPGRSLRLSCAASGF | 1488 |
| 2386 | | | CoV1 | | SARS-CoV2 | RBD | Human Patient | | TFSSYGMHWVRQAPGKGLEWVAVIWF | |
| | | | | | | | | | DGSNKHYADSVKGRFTISRDNSKNTLYL | |
| | | | | | | | | | QMNSLRAEDTAVYYCAREGDFWSGYYT | |
| | | | | | | | | | GWFDPWGQGTLVTVSS | |
| CoV2- | Ab | SARS-CoV1, | | | SARS-CoV2 | S; non- | B-cells; SARS-CoV2 | 410 | QVQLVESGGGVVQPGRSLRLSCAASGF | 1489 |
| 2387 | | SARS-CoV2 | | | | RBD | Human Patient | | TFSSYGMHWVRQAPGKGLEWVAVISY | |
| | | | | | | | | | DGSNKYYADSVKGRFTISRDNSKNTLYL | |
| | | | | | | | | | QMNSLRAEDTAVYYCAKDLTIVVIPAAP | |
| | | | | | | | | | NFDYWGQGTLVTVSS | |
| CoV2- | Ab | SARS-CoV1, | | | SARS-CoV2 | S; non- | B-cells; SARS-CoV2 | 411 | EVQLLESGGGLVQPGGSLRLSCAASGFT | 1490 |
| 2388 | | SARS-CoV2 | | | | RBD | Human Patient | | FSSYAMSWVRQAPGKGLEWVSFISGTG | |
| | | | | | | | | | DSTYYADSVKGRFTISRDNSKNTLYLQM | |
| | | | | | | | | | NSLRAEDTAVYYCAKDQARVQDYIWGS | |
| | | | | | | | | | YRSYGMDVWGLGTTVTVSS | |

| | | | | | | SEQ | | SEQ | | |
|---|---|---|---|---|---|---|---|---|---|---|
| | | Heavy V | Heavy J | Light V | Light J | ID | | ID | | |
| Name | VL | Gene | Gene | Gene | Gene | NO.: | CDRH3 | NO.: | CDRL3 | Sources |
| CoV2- | EIVLTQSPATLSLSPGERATLSCRASQS | IGHV1-69 | IGHJ4 | IGKV3-11 | IGKJ4 | 2486 | ARTSHYDSSG | 3688 | HKRSNWP | Seth Zost et al., 2020 |
| 2367 | VSSYLAWYQQKPGQAPRLLIYDASNR | (Human) | (Human) | (Human) | (Human) | | SYFEY | | PSLT | (https://www.nature.co |
| | ATGIPARFSGSGSGTDFTLTISSLDPED | | | | | | | | | m/articles/s41591-020- |
| | FAVYYCHKRSNWPPSLTFGGGTKVEIK | | | | | | | | | 0998-x) |
| CoV2- | SNELTQPPSVSVSPGQTARITCSGDAL | IGHV5-51 | IGHJ6 | IGLV3-25 | IGLJ2 | 2487 | ARRRGGIGIE | 3689 | QSTASSGT | Seth Zost et al., 2020 |
| 2368 | PKQYAYWYQQKPGQAPVLVIYKDTER | (Human) | (Human) | (Human) | (Human) | | YGMDV | | VV | (https://www.nature.co |
| | PSGIPERFSGSSSGTTVTLTISGVQAED | | | | | | | | | m/articles/s41591-020- |
| | EADYYCQSTASSGTYVVFGGGTKLTVL | | | | | | | | | 0998-x) |
| CoV2- | DIQMTQSPSTLSASVGDRVTITCRASQ | IGHV3-30 | IGHJ4 | IGKV1-5 | IGKJ1 | 2488 | AKDFGGDNT | 3690 | QQYNSYSP | Seth Zost et al., 2020 |
| 2369 | SISSWLAWYQQKPGKAPKLLIYKASSL | (Human) | (Human) | (Human) | (Human) | | AMVEYFFDF | | T | (https://www.nature.co |
| | ESGVPSRFSGSGSGTEFTLTISSLQPDD | | | | | | | | | m/articles/s41591-020- |
| | FATYYCQQYNSYSPTFGQGTKVEIK | | | | | | | | | 0998-x) |
| CoV2- | NFMLTQPHSVSESPGKTVTFSCTGSSG | IGHV4-61 | IGHJ4 | IGLV6-57 | IGLJ2 | 2489 | AGSPVPPTIV | 3691 | QSYDGINR | Seth Zost et al., 2020 |
| 2370 | SIASNYVQWYQQRPGSAPTTVIYEDN | (Human) | (Human) | (Human) | (Human) | | GASY | | WLV | (https://www.nature.co |
| | QRPSGVPDRFSGSIDSSSNSASLTISGL | | | | | | | | | m/articles/s41591-020- |
| | KTEDEADYYCQSYDGINRWLVFGGGT | | | | | | | | | 0998-x) |
| | KLTVL | | | | | | | | | |
| CoV2- | EIVMTQSPATLSVSPGERATLSCRASQ | IGHV3-30 | IGHJ4 | IGKV3-15 | IGKJ1 | 2490 | AKGRGNYLTF | 3692 | QQYNNWP | Seth Zost et al., 2020 |
| 2371 | SVSSNLAWYQQKPGQAPRLLIYGAST | (Human) | (Human) | (Human) | (Human) | | FDS | | GT | (https://www.nature.co |
| | RATGIPARFSGSGSGTEFTLTISSLQSE | | | | | | | | | m/articles/s41591-020- |
| | DFAVYYCQQYNNWPGTFGQGTKVEI | | | | | | | | | 0998-x) |
| | K | | | | | | | | | |
| CoV2- | EIVLTQSPGTLSLSPGERATLSCRASQS | IGHV3-66 | IGHJ6 | IGKV3-20 | IGKJ2 | 2491 | ARDPGSRYSG | 3693 | QQYGSSPP | Seth Zost et al., 2020 |
| 2373 | VSSSYLAWYQQKPGQAPRLLIYGASSR | (Human) | (Human) | (Human) | (Human) | | GWYDYYYAM | | YT | (https://www.nature.co |
| | ATGIPDRFSGSGSGTDFTLTISRLEPED | | | | | | DV | | | m/articles/s41591-020- |
| | FAVYYCQQYGSSPPYTFGQGTKLEIK | | | | | | | | | 0998-x) |
| CoV2- | QPVLTQPPSASASLGASVTLTCTLSSGY | IGHV5-51 | IGHJ4 | IGLV9-49 | IGLJ2 | 2492 | ARRDTDFDY | 3694 | GADHGSG | Seth Zost et al., 2020 |
| 2378 | SNYKVDWFQQRPGKGPRFVMRVGT | (Human) | (Human) | (Human) | (Human) | | | | SNFVYVV | (https://www.nature.co |
| | GGIVGSKGDGIPDRFSVLGSGLNRYLTI | | | | | | | | | m/articles/s41591-020- |
| | KNIQEEDESDYHCGADHGSGSNFVYV | | | | | | | | | 0998-x) |
| | VFGGGTKLTVL | | | | | | | | | |
| CoV2- | EVVLTQSPGTLSLSPGERATLSCRASQS | IGHV1-58 | IGHJ3 | IGKV3-20 | IGKJ1 | 2493 | AAPYCSRTSC | 3695 | QHFGSSSQ | Seth Zost et al., 2020 |
| 2381 | VSSSYLAWYQQKPGQAPRLLIYGASSR | (Human) | (Human) | (Human) | (Human) | | HDAFDI | | WT | (https://www.nature.co |
| | ATGIPDRFSGSGSGTDFTLTISRLEPED | | | | | | | | | m/articles/s41591-020- |
| | FAVYHCQHFGSSSQWTFGQGTKVEIK | | | | | | | | | 0998-x) |
| CoV2- | QTVVTQEPSLTVSPGGTVTLTCASSTG | IGHV3-30 | IGHJ4 | IGLV7-43 | IGLJ3 | 2494 | AKDLPPYASG | 3696 | LLYYGGPW | Seth Zost et al., 2020 |
| 2382 | AVTSGYFPNWFQQKPGQAPRALIFST | (Human) | (Human) | (Human) | (Human) | | WYEGGFDY | | V | (https://www.nature.co |
| | NNRHSWTPARFSGSLLGDKAALTLSG | | | | | | | | | m/articles/s41591-020- |
| | VQPEDEAEYYCLLYYGGPWVFGGGTK | | | | | | | | | 0998-x) |
| | LTVL | | | | | | | | | |
| CoV2- | EIVMTQSPGTLSVSPGERATLSCRASQ | IGHV3-30 | IGHJ4 | IGKV3-15 | IGKJ1 | 2495 | AQGRGGYYS | 3697 | QQYNNWP | Seth Zost et al., 2020 |
| 2383 | TLSSNLAWYQQKPGQAPRLLIYGASTR | (Human) | (Human) | (Human) | (Human) | | PFDD | | LA | (https://www.nature.co |
| | ATGIPARFSGSGSGTEFTLTISSLQSEDF | | | | | | | | | m/articles/s41591-020- |
| | AVYHCQQYNNWPLAFGQGTKVEIK | | | | | | | | | 0998-x) |
| CoV2- | QSALTQPASVSGSPGQSITISCTGTSSD | IGHV2-26 | IGHJ2 | IGLV2-23 | IGLJ2 | 2496 | ARTTWGTWI | 3698 | CSYAGGNT | Seth Zost et al., 2020 |
| 2384 | IGSYNLVSWYQQYPGKAPKLMIYEVSK | (Human) | (Human) | (Human) | (Human) | | QAWYFDI | | FVV | (https://www.nature.co |
| | RPSGVSNRFSGSKSGNTASLTISGLQA | | | | | | | | | m/articles/s41591-020- |
| | EDEADYYCCSYAGGNTFVVFGGGTKL | | | | | | | | | 0998-x) |
| | TVL | | | | | | | | | |
| CoV2- | EIVMTQSPATLSVSPGERATLSCRASQ | IGHV3-33 | IGHJ5 | IGKV3-15 | IGKJ1 | 2497 | AREGDFWSG | 3699 | QQYNNWP | Seth Zost et al., 2020 |
| 2386 | SVSSNLAWYQQKPGQAPRLLIYGAST | (Human) | (Human) | (Human) | (Human) | | YYTGWFDP | | RT | (https://www.nature.co |
| | RATGIPARFSGSGSGTEFTLTISSLQSE | | | | | | | | | m/articles/s41591-020- |
| | DFAVYYCQQYNNWPRTFGQGNRVEI | | | | | | | | | 0998-x) |
| | N | | | | | | | | | |
| CoV2- | QSALTQPASVSGSPGQSITISCTGTSSD | IGHV3-30 | IGHJ4 | IGLV2-14 | IGLJ2 | 2498 | AKDLTIVVIPA | 3700 | SSYTSSST | Seth Zost et al., 2020 |
| 2387 | VGGYNYVSWYQQHPGKAPKLMIYDV | (Human) | (Human) | (Human) | (Human) | | APNFDY | | PVV | (https://www.nature.co |
| | SNRPSGVSNRFSGSRSGNTASLTISGL | | | | | | | | | m/articles/s41591-020- |
| | QAEDEADYYCSSYTSSSTPVVFGGGTK | | | | | | | | | 0998-x) |
| | LTVL | | | | | | | | | |
| CoV2- | DIVMTQSPLSLPVTPGEPASISCRSSQS | IGHV3-23 | IGHJ6 | IGKV2-28 | IGKJ1 | 2499 | AKDQARVQD | 3701 | MQALQTP | Seth Zost et al., 2020 |
| 2388 | LLHSNGYNYLDWYLQKPGQSPHLLIYL | (Human) | (Human) | (Human) | (Human) | | YIWGSYRSYG | | RT | (https://www.nature.co |
| | GSNRASGVPDRFSGSGSGTDFTLKISR | | | | | | MDV | | | m/articles/s41591-020- |
| | VEAEDVGVYYCMQALQTPRTFGQGT | | | | | | | | | 0998-x) |
| | KVEIK | | | | | | | | | |

| | | | | | Not | | | | | |
|---|---|---|---|---|---|---|---|---|---|---|
| | Ab | | | Neutral- | Neutral- | | | SEQ | | SEQ |
| | or | | Doesn't | ising | ising | Protein + | | ID | | ID |
| Name | Nb | Binds to | Bind to | Vs | Vs | Epitope | Origin | NO.: | VH or VHH | NO.: |
| CoV2- | Ab | SARS-CoV2 | SARS- | SARS-CoV2 | | S; RBD | B-cells; SARS-CoV2 | 412 | EVQLVESGGGLVQPGRSLRLSCAASGFT | 1491 |
| 2389 | | | CoV1 | | | | Human Patient | | FDDYAMHWVRQAPGKGLEWVSGISW | |
| | | | | | | | | | NSGTIGYADSVKGRFIISRDNAKNSLYLQ | |
| | | | | | | | | | MNSLRPEDTALYYCAKDIIRQGEDGMD | |
| | | | | | | | | | VWGQGTTVTVSS | |
| CoV2- | Ab | SARS-CoV2 | SARS- | SARS-CoV2 | | S; RBD | B-cells; SARS-CoV2 | 413 | QVQLVQSGAEVKKPGASVKVSCKASGY | 1492 |
| 2391 | | | CoV1 | | | | Human Patient | | TFGSFDINWVRQATGQGLEWMGRMN | |
| | | | | | | | | | SNSGNTAYAQKFQGRVTMTRDTSTNTA | |
| | | | | | | | | | YMELSSLRSEDTAMYYCARMRSGWPTH | |
| | | | | | | | | | GRPDDFWGRGTLVTVSS | |
| CoV2- | Ab | SARS-CoV2 | SARS- | | SARS-CoV1, | S; NTD | B-cells; SARS-CoV2 | 414 | EVQLVESGGGLVKPGGSLRLSCAASGFT | 1493 |
| 2394 | | | CoV1 | | SARS-CoV2 | | Human Patient | | FSGYSMNWVRQAPGKGLEWVSSISSSS | |
| | | | | | | | | | SYIYYADSVKGRFTISRDNAKNSLYLQMN | |
| | | | | | | | | | SLRAEDTAVYYCARWLQLRSDYYYFGM | |
| | | | | | | | | | DVWGQGTTVTVSS | |
| CoV2- | Ab | SARS-CoV1, | | | SARS-CoV2 | S; non- | B-cells; SARS-CoV2 | 415 | EVQLVESGGGLVQPGGSLRLSCVASGFT | 1494 |
| 2397 | | SARS-CoV2 | | | | RBD | Human Patient | | FSFYWMSWVRQAPGKGLEWVANIKQ | |
| | | | | | | | | | DGGEKYYVDSVKGRFTISRDNAKNSLYL | |
| | | | | | | | | | QMNSLRAEDTAVYYCARLSGSSWDFDY | |
| | | | | | | | | | WGQGTLVTVSS | |
| CoV2- | Ab | SARS-CoV2 | SARS- | | SARS-CoV1, | S; RBD | B-cells; SARS-CoV2 | 416 | EVQLVESGGGLVQPGGSLRLSCAASGFS | 1495 |
| 2399 | | | CoV1 | | SARS-CoV2 | | Human Patient | | VSTNYMSWVRQAPGKGLEWVSVIYSG | |
| | | | | | | | | | GSTFYADSVKGRFTISRDNSKNTLYLQM | |
| | | | | | | | | | NSLRAEDTAVYYCARDYRDWIWGQGTL | |
| | | | | | | | | | VTVSS | |
| CoV2- | Ab | SARS-CoV2 | SARS- | | SARS-CoV1, | S; non- | B-cells; SARS-CoV2 | 417 | QITLKESGPTLVKPTQTLTLTCTFSGFSLS | 1496 |
| 2400 | | | CoV1 | | SARS-CoV2 | RBD | Human Patient | | TSGVGVGWIRQPPGKALEWLALIYWD | |
| | | | | | | | | | DDKRYSPSLKSRLTITKDTSKNQVVLTMT | |
| | | | | | | | | | NMDPVDTATYYCAHNRFQYCSSTTCYTL | |
| | | | | | | | | | LPFDYWGQGTLVTVSS | |
| CoV2- | Ab | SARS-CoV1, | | | SARS-CoV2 | S; non- | B-cells; SARS-CoV2 | 418 | QVQLVESGGGVVQPGRSLRLSCAASGF | 1497 |
| 2401 | | SARS-CoV2 | | | | RBD | Human Patient | | TFSSYALFWVRQAPGKGLEWVAVISYD | |
| | | | | | | | | | GNNKYYADSVRGRFTISRDNSKNTLYLQ | |
| | | | | | | | | | MNSLRPEDTAVYYCARPYTGSYKSYMD | |
| | | | | | | | | | VWGKGTTVTVSS | |
| CoV2- | Ab | SARS-CoV1, | | | SARS-CoV2 | S; non- | B-cells; SARS-CoV2 | 419 | QVQLVESGGGVVQPGRSLRLSCAASGF | 1498 |
| 2403 | | SARS-CoV2 | | | | RBD | Human Patient | | TFSSYAMHWVRQAPGKGLEWVAVISY | |
| | | | | | | | | | DGSNKYYADSVKGRFTISRDNSKNTLYL | |
| | | | | | | | | | QMSSLRAEDTAVFYCARGDGDVYNFLL | |
| | | | | | | | | | VRNWFDPWGQGTLVTVSS | |
| CoV2- | Ab | SARS-CoV2 | SARS- | | SARS-CoV1, | S; NTD | B-cells; SARS-CoV2 | 420 | QLQLQESGPGLVKPSETLSLTCTVSGGSI | 1499 |
| 2405 | | | CoV1 | | SARS-CoV2 | | Human Patient | | SSSSYYWGWIRQPPGKGLEWIGSFYYSG | |
| | | | | | | | | | STYYNPSLKSRVTISVDTSKNQFSLNLSSV | |
| | | | | | | | | | TAADTAVYSCASLWFGDLYSFDYWGQG | |
| | | | | | | | | | TLVTVSS | |
| CoV2- | Ab | SARS-CoV1, | | | SARS-CoV2 | S; non- | B-cells; SARS-CoV2 | 421 | EVQLVESGGGLVQPGGSLRLSCADSAFT | 1500 |
| 2406 | | SARS-CoV2 | | | | RBD | Human Patient | | FSSFWMSWVRQAPGKGLEWVANIKQ | |
| | | | | | | | | | DGSEKFYLDSVKGRFTISRDNAKNSLYLQ | |
| | | | | | | | | | MNSLRAEDTAVYYCARLGRSSWNFDY | |
| | | | | | | | | | WGQGTLVTVSS | |
| CoV2- | Ab | SARS-CoV1, | | | SARS-CoV2 | S; non- | B-cells; SARS-CoV2 | 422 | QVQLQESGPGLVKPSQTLSLTCTVSGDSI | 1501 |
| 2408 | | SARS-CoV2 | | | | RBD | Human Patient | | SSGSYYWSWIRQPAGKGLEWIGRIYTSG | |
| | | | | | | | | | STTYNPSLKSRVTISVNTSKNQFSLNLSSV | |
| | | | | | | | | | TAADTAVYYCARVGGISPYYYYYYMDV | |
| | | | | | | | | | WGKGTTVTVSS | |
| CoV2- | Ab | SARS-CoV2 | SARS- | SARS-CoV2 | | S; RBD | B-cells; SARS-CoV2 | 423 | QVQLVQSGAEVKKPGASVKVSCKASGY | 1502 |
| 2413 | | | CoV1 | (weak) | | | Human Patient | | TFTSYDINWVRQATGQGLEWMGWMN | |
| | | | | | | | | | PNSGNAGYGQKFQGRVTMTRNTSISTA | |
| | | | | | | | | | YMELSSLRSEDTAVYYCARMRSGWPTH | |
| | | | | | | | | | GRPDDYWGRGTLVTVSS | |
| CoV2- | Ab | SARS-CoV2 | SARS- | | SARS-CoV1, | S; RBD | B-cells; SARS-CoV2 | 424 | QVQLQESGPGLVKPSQTLSLTCTVSGGSI | 1503 |
| 2416 | | | CoV1 | | SARS-CoV2 | | Human Patient | | SSGGYYWSWIRQHPGKGLEWIGYIYYS | |
| | | | | | | | | | GSTYYNPSLKSRVTISVDTSKNQFSLKLSS | |
| | | | | | | | | | VTAADTAVYYCASAKLVATISYFDYWGQ | |
| | | | | | | | | | GTLVTVSS | |
| CoV2- | Ab | SARS-CoV1, | | | SARS-CoV2 | S; RBD | B-cells; SARS-CoV2 | 425 | QVQLQQWGAGLLKPSETLSLTCAVYGG | 1504 |
| 2417 | | SARS-CoV2 | | | | | Human Patient | | SFSGYYWNWLRQPPGKGLEWIGEINHS | |
| | | | | | | | | | GSTNYNPSLKSRVTISVDTSKNQFSLKLSS | |
| | | | | | | | | | VTAADTAVYYCARVGGYYYYYMDVWG | |
| | | | | | | | | | KGTTVTVSS | |

| | | | | | | SEQ | | SEQ | | |
|---|---|---|---|---|---|---|---|---|---|---|
| | | Heavy V | Heavy J | Light V | Light J | ID | | ID | | |
| Name | VL | Gene | Gene | Gene | Gene | NO.: | CDRH3 | NO.: | CDRL3 | Sources |
| CoV2- | DIQMTQSPSSLSASVGDRVTITCRASQ | IGHV3-9 | IGHJ6 | IGKV1-39 | IGKJ1 | 2500 | AKDIIRQGED | 3702 | QQSYSTP | Seth Zost et al., 2020 |
| 2389 | NIASYLNWYQQKPGKAPKLLIYAASSL | (Human) | (Human) | (Human) | (Human) | | GMDV | | WT | (https://www.nature.co |
| | QSGVPSRFSGSGSGTDFTLTISSLQPEE | | | | | | | | | m/articles/s41591-020- |
| | FATYYCQQSYSTPWTFGQGTKVEIK | | | | | | | | | 0998-x) |
| CoV2- | QSVLTQAPSASGTPGQRVTISCSGSNS | IGHV1-8 | IGHJ4 | IGLV1-44 | IGLJ2 | 2501 | ARMRSGWPT | 3703 | AVWDDSL | Seth Zost et al., 2020 |
| 2391 | NIGSYTINWYQQLPGTAPKLLIYGNDQ | (Human) | (Human) | (Human) | (Human) | | HGRPDDF | | NGLV | (https://www.nature.co |
| | RTSGVPDRFSGSKFGTSASLAISGLQSE | | | | | | | | | m/articles/s41591-020- |
| | DENNYYCAVWDDSLNGLVFGGGTKL | | | | | | | | | 0998-x |
| | TVL | | | | | | | | | |
| CoV2- | EIVMTQSPATLSVSPGERATLSCRASQ | IGHV3-21 | IGHJ6 | IGKV3-15 | IGKJ1 | 2502 | ARWLQLRSD | 3704 | QQCYNWP | Seth Zost et al., 2020 |
| 2394 | SVSNNLAWYQHKPGQAPRLLIYGAST | (Human) | (Human) | (Human) | (Human) | | YYYFGMDV | | PWT | (https://www.nature.co |
| | RATGIPARFSGSGSGTEFTLTISSLQSE | | | | | | | | | m/articles/s41591-020- |
| | DFAVYFCQQCYNWPPWTFGQGTKVE | | | | | | | | | 0998-x) |
| | IK | | | | | | | | | |
| CoV2- | SYELTQPPSVSVSPGQTASITCSGDKLG | IGHV3-7 | IGHJ4 | IGLV3-1 | IGLJ1 | 2503 | ARLSGSSWDF | 3705 | QAWDSST | Seth Zost et al., 2020 |
| 2397 | DKYACWYQQRPGQSPVLVIYQDSKRP | (Human) | (Human) | (Human) | (Human) | | DY | | GV | (https://www.nature.co |
| | SGIPERFSGSNSGNTATLTISGTQAMD | | | | | | | | | m/articles/s41591-020- |
| | EADYYCQAWDSSTGVFGTGTKVTVL | | | | | | | | | 0998-x) |
| CoV2- | DIQMTQSPSSLSASVGDRVTITCQASQ | IGHV3-66 | IGHJ4 | IGKV1-33 | IGKJ1 | 2504 | ARDYRDWI | 3706 | QQYHNLP | Seth Zost et al., 2020 |
| 2399 | DISKYLNWYQQKPGKAPKLLIYDASNL | (Human) | (Human) | (Human) | (Human) | | | | RT | (https://www.nature.co |
| | ERGVPSRFSGSGSGTDFTFTISSLQAED | | | | | | | | | m/articles/s41591-020- |
| | IATYYCQQYHNLPRTFGQGTKVEIK | | | | | | | | | 0998-x) |
| CoV2- | DIQLTQSPSFLSASVRDRVTITCRASQG | IGHV2-5 | IGHJ4 | IGKV1-9 | IGKJ3 | 2505 | AHNRFQYCSS | 3707 | QQLNSYPF | Seth Zost et al., 2020 |
| 2400 | ISSYLAWYQQKPGKAPKLLIYAASTLQS | (Human) | (Human) | (Human) | (Human) | | TTCYTLLPFDY | | T | (https://www.nature.co |
| | GVPSRFSGSGSGTEFTLTISSLQPEDFA | | | | | | | | | m/articles/s41591-020- |
| | TYYCQQLNSYPFTFGPGTKVDIK | | | | | | | | | 0998-x) |
| CoV2- | DIVMTQSPDSLAVSLGERATINCKSSQ | IGHV3-30 | IGHJ6 | IGKV4-1 | IGKJ1 | 2506 | ARPYTGSYKS | 3708 | QQYYSISW | Seth Zost et al., 2020 |
| 2401 | SVLYSSNNKNSLAWYQQKPGQPPKLLI | (Human) | (Human) | (Human) | (Human) | | YMDV | | T | (https://www.nature.co |
| | YWASTRESGVPDRFSGSGSGTDFTLTI | | | | | | | | | m/articles/s41591-020- |
| | SSLQAEDVAVYYCQQYYSISWTFGQG | | | | | | | | | 0998-x) |
| | TKVEIK | | | | | | | | | |
| CoV2- | QSALTQPASVSGSPGQSITISCTGTSSD | IGHV3-30 | IGHJ5 | IGLV2-14 | IGLJ1 | 2507 | ARGDGDVYN | 3709 | SSYTSSST | Seth Zost et al., 2020 |
| 2403 | VGGYNYVSWYQQHPGKAPKLMIYDV | (Human) | (Human) | (Human) | (Human) | | FLLVRNWFDP | | LYV | (https://www.nature.co |
| | GNRPSGVSNRFSGSKSGNTASLTISGL | | | | | | | | | m/articles/s41591-020- |
| | QAEDEADYYCSSYTSSSTLYVFGTGTKV | | | | | | | | | 0998-x) |
| | TVL | | | | | | | | | |
| CoV2- | DIQMTQSPSSLSASVGDRVTFTCRASQ | IGHV4-39 | IGHJ4 | IGKV1-27 | IGKJ1 | 2508 | ASLWFGDLYS | 3710 | QKYNSAP | Seth Zost et al., 2020 |
| 2405 | GISNYLAWYQQKPGKVPKLLIYAASTL | (Human) | (Human) | (Human) | (Human) | | FDY | | WT | (https://www.nature.co |
| | QSGVPSRFSGIGSGTDFTLTISSLQPED | | | | | | | | | m/articles/s41591-020- |
| | VATYYCQKYNSAPWTFGQGTKVEIK | | | | | | | | | 0998-x) |
| CoV2- | SYELTQPPSVSVSPGQTASITCSGDKLG | IGHV3-7 | IGHJ4 | IGLV3-1 | IGLJ2 | 2509 | ARLGRSSWN | 3711 | QAWDSST | Seth Zost et al., 2020 |
| 2406 | DKFVCWYQQKPGQSPVLVIYQDNKR | (Human) | (Human) | (Human) | (Human) | | FDY | | GV | (https://www.nature.co |
| | PSGIPERFSGSNSGNTATLTISGTQALD | | | | | | | | | m/articles/s41591-020- |
| | EADYYCQAWDSSTGVFGGGTKLTVL | | | | | | | | | 0998-x) |
| CoV2- | DIQLTQSPSFLSASVGDRVTITCRASQG | IGHV4-61 | IGHJ6 | IGKV1-9 | IGKJ5 | 2510 | ARVGGISPYY | 3712 | QQLNSYPI | Seth Zost et al., 2020 |
| 2408 | ISSYLAWYQQKPGKAPKLLMYAASTL | (Human) | (Human) | (Human) | (Human) | | YYYYMDV | | T | (https://www.nature.co |
| | QSGVPSRFSGSGSGTEFTLTINTLQPE | | | | | | | | | m/articles/s41591-020- |
| | DFATYYCQQLNSYPITFGQGTRLEIK | | | | | | | | | 0998-x) |
| CoV2- | QSVLTQPPSASGTPGQRVTFSCSGSNS | IGHV1-8 | IGHJ4 | IGLV1-44 | IGLJ3 | 2511 | ARMRSGWPT | 3713 | AVWDDSL | Seth Zost et al., 2020 |
| 2413 | NIGSYTVNWYQQLPGTAPKLLIYDNN | (Human) | (Human) | (Human) | (Human) | | HGRPDDY | | NGLV | (https://www.nature.co |
| | QRPSGVPDRFSGSKSGTSASLAISGLQ | | | | | | | | | m/articles/s41591-020- |
| | SEDEADYYCAVWDDSLNGLVFGGGT | | | | | | | | | 0998-x) |
| | KLTVL | | | | | | | | | |
| CoV2- | QSVLTQPPSVSEAPRQRVTISCSGSSS | IGHV4-31 | IGHJ4 | IGLV1-36 | IGLJ2 | 2512 | ASAKLVATISY | 3714 | AAWDDSL | Seth Zost et al., 2020 |
| 2416 | NIGNNAVNWYQQLPGKAPKLLIYYDD | (Human) | (Human) | (Human) | (Human) | | FDY | | NGVV | (https://www.nature.co |
| | LLPSGVSDRFSGSKSGTSASLAISGLQS | | | | | | | | | m/articles/s41591-020- |
| | EDEADYYCAAWDDSLNGVVFGGGTK | | | | | | | | | 0998-x) |
| | LTVL | | | | | | | | | |
| CoV2- | DIQMTQSPSSLSASVGDRVTITCRASQ | IGHV4-34 | IGHJ6 | IGKV1-39 | IGKJ4 | 2513 | ARVGGYYYYY | 3715 | QQSYTTLL | Seth Zost et al., 2020 |
| 2417 | SITSYLNWYQQRPGKAPKLLIYAASSLQ | (Human) | (Human) | (Human) | (Human) | | MDV | | T | (https://www.nature.co |
| | SGVPSRFSGSGSGTDFTLSISSLQPEDF | | | | | | | | | m/articles/s41591-020- |
| | ATYYCQQSYTTLLTFGGGTKVEIK | | | | | | | | | 0998-x) |

| | | | | | Not | | | | | |
|---|---|---|---|---|---|---|---|---|---|---|
| | Ab | | | Neutral- | Neutral- | | | SEQ | | SEQ |
| | or | | Doesn't | ising | ising | Protein + | | ID | | ID |
| Name | Nb | Binds to | Bind to | Vs | Vs | Epitope | Origin | NO.: | VH or VHH | NO.: |
| CoV2- | Ab | SARS-CoV2 | SARS- | | SARS-CoV1, | S; non- | B-cells; SARS-CoV2 | 426 | EVRLLESGGGLVQPGGSLRLSCAASGFT | 1505 |
| 2418 | | | CoV1 | | SARS-CoV2 | RBD | Human Patient | | FSDYAMNWVRQAPGKGLEWVSAISAT | |
| | | | | | | | | | GGSTFYADSVKGRFSISRDNSKNSLVLQ | |
| | | | | | | | | | MNSLRAEDTAVYYCAKPYGMDVWGQ | |
| | | | | | | | | | GTTVTVSS | |
| CoV2- | Ab | SARS-CoV2 | SARS- | | SARS-CoV1, | S; non- | B-cells; SARS-CoV2 | 427 | QGQLVQSGGDVVQPGKSLRLSCAASGF | 1506 |
| 2420 | | | CoV1 | | SARS-CoV2 | RBD | Human Patient | | TFTNYAMHWVRQAPGKGLEWVAVISN | |
| | | | | | | | | | DGSNEKYVDSVKGRFSLSRDNSKNTVYL | |
| | | | | | | | | | DMHSLRPEDTAIYYCARDRSNLERLVMT | |
| | | | | | | | | | FGGIIAGAFDIWGQGARVTVSS | |
| CoV2- | Ab | SARS-CoV1, | | | SARS-CoV2 | S; non- | B-cells; SARS-CoV2 | 428 | QVQLVESGGGVVQPGRSLRLSCAASGF | 1507 |
| 2422 | | SARS-CoV2 | | | | RBD | Human Patient | | TFSSYAMYWVRQAPGKGLEWVAVISYD | |
| | | | | | | | | | GINKYYADSVKGRFTISRDNSKNTLYLQ | |
| | | | | | | | | | MNSLRAEDTAVYYCARVNSGSYYSYFDY | |
| | | | | | | | | | WGQGTLVTVSS | |
| CoV2- | Ab | SARS-CoV2 | SARS- | | SARS-CoV1, | S; non- | B-cells; SARS-CoV2 | 429 | QVQLQESGPGLVKPSGTLSLTCAVSGGS | 1508 |
| 2427 | | | CoV1 | | SARS-CoV2 | RBD | Human Patient | | ISSSNWWSWVRQPPGKGLEWIGEIYHS | |
| | | | | | | | | | GSTNYNPSLKSRVTISVDKSKNQFSLKLN | |
| | | | | | | | | | SVTAADTAVYYCASRWGDYFDSSGAYD | |
| | | | | | | | | | SWGQGTLLTVSS | |
| CoV2- | Ab | SARS-CoV2 | SARS- | | SARS-CoV1, | S; non- | B-cells; SARS-CoV2 | 430 | QVQLVESGGGVVQPGKSLRLSCAASGF | 1509 |
| 2428 | | | CoV1 | | SARS-CoV2 | RBD | Human Patient | | TFSSYGMHWVRQAPGKGLEWVAVIWY | |
| | | | | | | | | | DGNNKFYVDSVKGRFTISRDNSKNTLY | |
| | | | | | | | | | MEMNSLRAEDTAVYYCARKGPLWRFD | |
| | | | | | | | | | YWGQGTLVTVSS | |
| CoV2- | Ab | SARS-CoV1, | | | SARS-CoV2 | S; non- | B-cells; SARS-CoV2 | 431 | EVQLVESGGGLIQPGGSLRLSCAASGFIV | 1510 |
| 2429 | | SARS-CoV2 | | | | RBD | Human Patient | | SSNYMSWVRQAPGKGLEWVSVIYSGG | |
| | | | | | | | | | STYYADSVKGRFTISRDNSKNTLYLQMN | |
| | | | | | | | | | SLRAEDTAVYYCARESTQWGQGTLVTV | |
| | | | | | | | | | SS | |
| CoV2- | Ab | SARS-CoV1, | | | SARS-CoV2 | S; non- | B-cells; SARS-CoV2 | 432 | QLQLQESGPGLVKPSETLSLTCTVSGGSI | 1511 |
| 2430 | | SARS-CoV2 | | | | RBD | Human Patient | | SSSSYYWGWIRQPPGKGLEWIGSVYYIG | |
| | | | | | | | | | STYYNPSLKSRVTMSVDTSKNQFSLKLSS | |
| | | | | | | | | | VTAADTAVYYCARAPFQLLDKYYFFYYM | |
| | | | | | | | | | DVWGKGTTVTVSS | |
| CoV2- | Ab | SARS-CoV2 | SARS- | | SARS-CoV1, | S; RBD | B-cells; SARS-CoV2 | 433 | EVQLVESGGDLIQPGGSLRLSCAASGLT | 1512 |
| 2434 | | | CoV1 | | SARS-CoV2 | | Human Patient | | VSSNYMSWVRQAPGKGLEWVSIIYSGG | |
| | | | | | | | | | STYYADSVKGRFSISRDNSNNTLYLQMN | |
| | | | | | | | | | SLRAEDTAVYFCARHIPAWGYKWGQGT | |
| | | | | | | | | | LVTVSS | |
| CoV2- | Ab | SARS-CoV2 | SARS- | | SARS-CoV1, | S; NTD | B-cells; SARS-CoV2 | 434 | EVQLLESGGGLVQPGGSLRLSCAASGFT | 1513 |
| 2438 | | | CoV1 | | SARS-CoV2 | | Human Patient | | FTSYGMSWVRQAPGKGLEWVSAISISG | |
| | | | | | | | | | GSTYYADSVKGRFTISRDNSKNTLYLQM | |
| | | | | | | | | | NSLRAEDTAVYYCAKLLGSGITLDNDAF | |
| | | | | | | | | | DIWGQGTMVTVSS | |
| CoV2- | Ab | SARS-CoV1, | | | SARS-CoV2 | S; non- | B-cells; SARS-CoV2 | 435 | QVQLVQSGAEVKKPGSSVKVSCKASGG | 1514 |
| 2441 | | SARS-CoV2 | | | | RBD | Human Patient | | TFSSYAIIWVRQAPGQGLEWMGGIIPIF | |
| | | | | | | | | | GTTNYAQKFQGRVTITADESTSTAYVELS | |
| | | | | | | | | | SLRSEDTAVYYCARIGHFDSSGYYLDYW | |
| | | | | | | | | | GQGTLVTVSS | |
| CoV2- | Ab | SARS-CoV2 | SARS- | | SARS-CoV1, | S; NTD | B-cells; SARS-CoV2 | 436 | EVQLLESGGGLVQPGGSLRLSCAASGFT | 1515 |
| 2444 | | | CoV1 | | SARS-CoV2 | | Human Patient | | FTSYAMNWVRQAPGKGLEWVSAISVS | |
| | | | | | | | | | GGSTYYADSVKGRFTISRDNSKNTLYLQ | |
| | | | | | | | | | MNSLRAEDTAVYYCAKDFGSGIVGATG | |
| | | | | | | | | | FDFWGQGTLVTVSS | |
| CoV2- | Ab | SARS-CoV2 | SARS- | | SARS-CoV1, | S; non- | B-cells; SARS-CoV2 | 437 | EVQLVESGGGVVRPGGSLRLSCAASGFT | 1516 |
| 2445 | | | CoV1 | | SARS-CoV2 | RBC | Human Patient | | FDDYGMSWVRQAPGKGLEWVSAINW | |
| | | | | | | | | | NGGSTGYADSVKGRFTISRDNAKNSLYL | |
| | | | | | | | | | QMNSLRAEDTALYHCARRRSSSRYSSG | |
| | | | | | | | | | WYMYYYYMDVWGKGTTVTVSS | |
| CoV2- | Ab | SARS-CoV2 | SARS- | | SARS-CoV1, | S; non- | B-cells; SARS-CoV2 | 438 | EVQLVQSGAEVKKPGESLKISCKGSGYSF | 1517 |
| 2446 | | | CoV1 | | SARS-CoV2 | RBD | Human Patient | | TNSWIGWVRQMPGKGLEWMGIIYPG | |
| | | | | | | | | | DSDTRYSPSFQGQVTISADKSISTAYLQW | |
| | | | | | | | | | SSLKASDTAIYYCATHRCSGGFCYLAYWG | |
| | | | | | | | | | QGTLVTVSS | |
| CoV2- | Ab | SARS-CoV1, | | | SARS-CoV2 | S; non- | B-cells; SARS-CoV2 | 439 | QVQLVESGGGVVQPGRSLRLSCATSGFT | 1518 |
| 2449 | | SARS-CoV2 | | | | RBD | Human Patient | | FSSFALHWVRQAPGKGLEWVTVISDDG | |
| | | | | | | | | | NNKYYVDSVKGRFTISRDNSKNTLFLQM | |
| | | | | | | | | | NSLRVEDTAIYYCARASYNSNWSIGEYFR | |
| | | | | | | | | | DWGQGTLVTVSS | |

| | | | | | | SEQ | | SEQ | | |
|---|---|---|---|---|---|---|---|---|---|---|
| | | Heavy V | Heavy J | Light V | Light J | ID | | ID | | |
| Name | VL | Gene | Gene | Gene | Gene | NO.: | CDRH3 | NO.: | CDRL3 | Sources |
| CoV2- | QSALTQPASVSGSPGQSITISCTGTSSD | IGHV3-23 | IGHJ6 | IGLV2-14 | IGLJ3 | 2514 | AKPYGMDV | 3716 | SSYTSTSTP | Seth Zost et al., 2020 |
| 2418 | VGGYNFVSWHQQHPGKAPKNMIYD | (Human) | (Human) | (Human) | (Human) | | | | WV | (https://www.nature.co |
| | VSKRPSGVSNRFSGSKSGNTASLTISGL | | | | | | | | | m/articles/s41591-020- |
| | HTEDEADYYCSSYTSTSTPWVFGGGTK | | | | | | | | | 0998-x) |
| | LTVL | | | | | | | | | |
| CoV2- | EIVMTQSPGTLSVSPGERATLSCRASQ | IGHV3-30 | IGHJ3 | IGKV3-15 | IGKJ5 | 2515 | ARDRSNLERL | 3717 | QQYHVWP | Seth Zost et al., 2020 |
| 2420 | SLSSHLAWYQQKPGQAPRLLIYGVSTR | (Human) | (Human) | (Human) | (Human) | | VMTFGGIIAG | | PIT | (https://www.nature.co |
| | ATGIPARFSGSGSGTEFTLAISSLQSED | | | | | | AFDI | | | m/articles/s41591-020- |
| | SAVYYCQQYHVWPPITFGQGTRLEIK | | | | | | | | | 0998-x) |
| CoV2- | DIVMTQSPDSLAVSLGERATINCKSSQ | IGHV3-30 | IGHJ4 | IGKV4-1 | IGKJ1 | 2516 | ARVNSGSYYS | 3718 | QQYYSTPL | Seth Zost et al., 2020 |
| 2422 | SVLYSSNNKNYLAWYQQKPGQPPKLLI | (Human) | (Human) | (Human) | (Human) | | YFDY | | T | (https://www.nature.co |
| | YWASTRESGVPDRFSGSGSGTDFTLTI | | | | | | | | | m/articles/s41591-020- |
| | SSLQAEDVAVYYCQQYYSTPLTFGQGT | | | | | | | | | 0998-x) |
| | KVEIK | | | | | | | | | |
| CoV2- | DIQMTQSPSSVSASVGDRVTITCRASQ | IGHV4-4 | IGHJ4 | IGKV1-12 | IGKJ4 | 2517 | ASRWGDYFD | 3719 | QQGNSFPL | Seth Zost et al., 2020 |
| 2427 | GISSWLAWYQQKPGKAPKLLIYAASSL | (Human) | (Human) | (Human) | (Human) | | SSGAYDS | | T | (https://www.nature.co |
| | QSGVPSRFSGSGSGTDFTLTITSLQPED | | | | | | | | | m/articles/s41591-020- |
| | FATYYCQQGNSFPLTFGGGTKVEIK | | | | | | | | | 0998-x) |
| CoV2- | QSVLTQPPSVSGAPGQRVTISCTGSSS | IGHV3-33 | IGHJ4 | IGLV1-40 | IGLJ3 | 2518 | ARKGPLWRF | 3720 | QSYDSSLS | Seth Zost et al., 2020 |
| 2428 | NIGAGYDVHWYQQIPGTAPKLLFYGN | (Human) | (Human) | (Human) | (Human) | | DY | | AWV | (https://www.nature.co |
| | NNRPSGVPDRFSDSKSGTSASLAITGL | | | | | | | | | m/articles/s41591-020- |
| | QAEDEADYYCQSYDSSLSAWVFGGGT | | | | | | | | | 0998-x) |
| | KLTVL | | | | | | | | | |
| CoV2- | DIQMTQSPSTLSASVGDRVTITCRASH | IGHV3-53 | IGHJ4 | IGKV1-5 | IGKJ1 | 2519 | ARESTQ | 3721 | QQYNTYS | Seth Zost et al., 2020 |
| 2429 | SISSWLAWYQQKPGKAPKLLIYKASSL | (Human) | (Human) | (Human) | (Human) | | | | QT | (https://www.nature.co |
| | ESGVPSRFSGSGSGTEFTLTISSLQPDD | | | | | | | | | m/articles/s41591-020- |
| | FATYYCQQYNTYSQTFGQGTKVEIK | | | | | | | | | 0998-x) |
| CoV2- | EIVLTQSPATLSLSPGERATLSCRASQS | IGHV4-39 | IGHJ6 | IGKV3-11 | IGKJ5 | 2520 | ARAPFQLLDK | 3722 | QQRSNWP | Seth Zost et al., 2020 |
| 2430 | VSSYLAWYQQKPGQAPRLLIYDASNR | (Human) | (Human) | (Human) | (Human) | | YYFFYYMDV | | PGVT | (https://www.nature.co |
| | ATGIPARFSGSGSGTDFTLTISSLEPEDF | | | | | | | | | m/articles/s41591-020- |
| | AVYYCQQRSNWPPGVTFGQGTRLEIK | | | | | | | | | 0998-x) |
| CoV2- | DIQMTQSPSSLSASVGDRVTITCQASQ | IGHV3-53 | IGHJ4 | IGKV1-33 | IGKJ2 | 2521 | ARHIPAWGY | 3723 | HQYDYLPY | Seth Zost et al., 2020 |
| 2434 | DIRNYLNWYQQKPGKAPELLIYDASNL | (Human) | (Human) | (Human) | (Human) | | K | | T | (https://www.nature.co |
| | ETGVPSRFSGSGSGTDFIFTISSLQPEDI | | | | | | | | | m/articles/s41591-020- |
| | ATYYCHQYDYLPYTFGQGTKLDIK | | | | | | | | | 0998-x) |
| CoV2- | DIQMTQSPSSLSASVGDRVTITCRASQ | IGHV3-23 | IGHJ3 | IGKV1-39 | IGKJ2 | 2522 | AKLLGSGITL | 3724 | QQTYSTPL | Seth Zost et al., 2020 |
| 2438 | SISSYLNWYQQKPGKAPKLLIYAATSLQ | (Human) | (Human) | (Human) | (Human) | | DNDAFDI | | YT | (https://www.nature.co |
| | SGVPSRFSGSGSGTDFTLTISSLQPEDF | | | | | | | | | m/articles/s41591-020- |
| | ATYYCQQTYSTPLYTFGQGTKLEIK | | | | | | | | | 0998-x) |
| CoV2- | EIVLTQSPATLSLSPGERATLSCRASQS | IGHV1-69 | IGHJ4 | IGKV3-11 | IGKJ3 | 2523 | ARIGHFDSSG | 3725 | QHRTNWP | Seth Zost et al., 2020 |
| 2441 | VSSFLAWYQQKPGQAPRLLIYDASNR | (Human) | (Human) | (Human) | (Human) | | YYLDY | | PLFT | (https://www.nature.co |
| | PTGIPARFTGSGSGTDFTLTISSLEPEDF | | | | | | | | | m/articles/s41591-020- |
| | AVYYCQHRTNWPPLFTFGPGTKVDIK | | | | | | | | | 0998-x) |
| CoV2- | SYELTQPPSVSVSPGQTARITCSGDALP | IGHV3-23 | IGHJ4 | IGLV3-25 | IGLJ2 | 2524 | AKDFGSGIVG | 3726 | QSADSSGT | Seth Zost et al., 2020 |
| 2444 | NQYAYWYQQKPGQAPVLVMCKDSE | (Human) | (Human) | (Human) | (Human) | | ATGFDF | | YVV | (https://www.nature.co |
| | RPSGIPERFSGSSSGTTVTLTISGVQAE | | | | | | | | | m/articles/s41591-020- |
| | DEADYYCQSADSSGTYVVFGGGTKLT | | | | | | | | | 0998-x) |
| | VL | | | | | | | | | |
| CoV2- | DIQMTQSPSTLSASVGDRVTITCRASQ | IGHV3-20 | IGHJ6 | IGKV1-5 | IGKJ1 | 2525 | ARRRSSSRYS | 3727 | QQYNTYSG | Seth Zost et al., 2020 |
| 2445 | SVSTWLAWYQQKPGKAPNLLIYEASSL | (Human) | (Human) | (Human) | (Human) | | SGWYMYYYY | | T | (https://www.nature.co |
| | ESGVPSRFSGSGSGTEFTLTISSLQPDD | | | | | | MDV | | | m/articles/s41591-020- |
| | FATYYCQQYNTYSGTFGQGTKVEIK | | | | | | | | | 0998-x) |
| CoV2- | QPVLTQPPSASASLGASVTLTCTLSSGY | IGHV5-51 | IGHJ4 | IGLV9-49 | IGLJ2 | 2526 | ATHRCSGGFC | 3728 | GADHGSG | Seth Zost et al., 2020 |
| 2446 | SNYKVDWYQQRPGKGPRFVMRVGT | (Human) | (Human) | (Human) | (Human) | | YLAY | | SNFVFVV | (https://www.nature.co |
| | GGIVGSKGDGIPDRFSVLGSGLNRYLTI | | | | | | | | | m/articles/s41591-020- |
| | KNIQEEDESDYHCGADHGSGSNFVFV | | | | | | | | | 0998-x) |
| | VFGGGTKLTVL | | | | | | | | | |
| CoV2- | DIVMTQSPDSLAVSLGERATINCKSSQ | IGHV3-30 | IGHJ1 | IGKV4-1 | IGKJ1 | 2527 | ARASYNSNW | 3729 | QQYYSPP | Seth Zost et al., 2020 |
| 2449 | SLLYTSNNKNYLAWYQQKPGQPPKLLI | (Human) | (Human) | (Human) | (Human) | | SIGEYFRD | | WT | (https://www.nature.co |
| | YWASTRESGVPDRFSGSGSGTDFTLTI | | | | | | | | | m/articles/s41591-020- |
| | SSLQAEDVAVYYCQQYYSPPWTFGQG | | | | | | | | | 0998-x) |
| | TKVEIK | | | | | | | | | |

| | | | | | Not | | | | | |
|---|---|---|---|---|---|---|---|---|---|---|
| | Ab | | | Neutral- | Neutral- | | | SEQ | | SEQ |
| | or | | Doesn't | ising | ising | Protein + | | ID | | ID |
| Name | Nb | Binds to | Bind to | Vs | Vs | Epitope | Origin | NO.: | VH or VHH | NO.: |
| CoV2- | Ab | SARS-CoV1, | | | SARS-CoV2 | S; RBD | B-cells; SARS-CoV2 | 440 | QVQLVESGGGVVQPGRSLRLSCAASGF | 1519 |
| 2450 | | SARS-CoV2 | | | | | Human Patient | | TFSTYGMHWVRQAPGKGLEWVAVILY | |
| | | | | | | | | | DGSNRYYADSVKGRFTISRDNSKNTLYL | |
| | | | | | | | | | QMNSLRAEDTAVYYCAKQGGLYCSGTN | |
| | | | | | | | | | CWGGYLDYWGQGTLVTVSS | |
| CoV2- | Ab | SARS-CoV2 | SARS- | | SARS-CoV1, | S; non- | B-cells; SARS-CoV2 | 441 | QITLKESGPTLVKPTQTLTLTCTVSGFSLS | 1520 |
| 2451 | | | CoV1 | | SARS-CoV2 | RBD | Human Patient | | TSGVGVGCIRQPPGKALEWLALIYWDD | |
| | | | | | | | | | DKRYSPSLKSRLTITRDTSKNQVVLTMTN | |
| | | | | | | | | | MDPVDTGTYFCVHRHVSGAFDYWGQG | |
| | | | | | | | | | TLVTVSS | |
| CoV2- | Ab | SARS-CoV1, | | | SARS-CoV2 | S; non- | B-cells; SARS-CoV2 | 442 | QVQLVQSGSELKKPGASVKVSCKASGYT | 1521 |
| 2453 | | SARS-CoV2 | | | | RBD | Human Patient | | FTSYAMNWVRQAPGQGLEWMGWINT | |
| | | | | | | | | | NTGNPTYAQGFTGRFVFSLDTSVNTAYL | |
| | | | | | | | | | QISSLKAEDTAVYYCARARLLGYCSSTSCY | |
| | | | | | | | | | TIGWGAFDIWGQGTMVTVSS | |
| CoV2- | Ab | SARS-CoV2 | SARS- | | SARS-CoV1, | S; non- | B-cells; SARS-CoV2 | 443 | QVQLVESGGGVVQPGRSLRLSCAASGF | 1522 |
| 2454 | | | CoV1 | | SARS-CoV2 | RBD | Human Patient | | TFSSYGMHWVRQAPGKGLEWVAVIWY | |
| | | | | | | | | | DGSNKYYADSVKGRFTISRDNSKNTLYL | |
| | | | | | | | | | QMNSLRAEDTAVYYCAREGQGTYLDY | |
| | | | | | | | | | WGQGTLVTVSS | |
| CoV2- | Ab | SARS-CoV2 | SARS- | | SARS-CoV1, | S; NTD | B-cells; SARS-CoV2 | 444 | EVQLVESGGGLVQPGGSLRLSCAASGFT | 1523 |
| 2455 | | | CoV1 | | SARS-CoV2 | | Human Patient | | FSSYEMINWVRQAPGKGLEWVSYISSSG | |
| | | | | | | | | | SAIYYADSVKGRFTISRDNAKNSLYLQM | |
| | | | | | | | | | INSLRVEDTAVYYCAREARSRYFDWLPSY | |
| | | | | | | | | | YFDYWGQGTLVTVSS | |
| CoV2- | Ab | SARS-CoV1, | | | SARS-CoV2 | S; non- | B-cells; SARS-CoV2 | 445 | QVQLVESGGGVVQPGRSLRLSCAASGF | 1524 |
| 2458 | | SARS-CoV2 | | | | RBD | Human Patient | | TFSRHAMHWVRQAPGKGLEWVAVISY | |
| | | | | | | | | | DGSNKYYADSVKGRFAISRDNSKNTLYL | |
| | | | | | | | | | QMNSLRPEDTAVYYCARDPSPLVLITSID | |
| | | | | | | | | | YWGQGTLVTVSS | |
| CoV2- | Ab | SARS-CoV2 | SARS- | | SARS-CoV1, | S; NTD | B-cells; SARS-CoV2 | 446 | QLQLQESGPGLVKPSETLSLTCTVSGGSI | 1525 |
| 2459 | | | CoV1 | | SARS-CoV2 | | Human Patient | | SSGTYYCGWIRQPPGKGLEWIGSTYYG | |
| | | | | | | | | | GSTLYNPSLRGRVTISVDTSKNQFSLKLSS | |
| | | | | | | | | | VTAADTAVYYCARRGNYYDSKNWFDP | |
| | | | | | | | | | WGQGTLVTVSS | |
| CoV2- | Ab | SARS-CoV1, | | | SARS-CoV2 | S; RBD | B-cells; SARS-CoV2 | 447 | QVQLQESGPGLVKPSQTLSLTCTVSGGSI | 1526 |
| 2461 | | SARS-CoV2 | | | | | Human Patient | | SSGGYFWSWIRQHPGKGLEWIGSIYYS | |
| | | | | | | | | | GSTYYNPSLRSRITISVDTSKNQFSLKLSS | |
| | | | | | | | | | VTAADTAVYYCARGGSGSYSLFDYWGQ | |
| | | | | | | | | | GTLVTVSS | |
| CoV2- | Ab | SARS-CoV1, | | | SARS-CoV2 | S; RBD | B-cells; SARS-CoV2 | 448 | EVQLVESGGGLVQPGGSLRLSCAASGFT | 1527 |
| 2462 | | SARS-CoV2 | | | | | Human Patient | | FSSSDLHWVRQATGKGLEWVSAIGTAG | |
| | | | | | | | | | DTYYLGSVKGRFTISRENGKNSLYLQMN | |
| | | | | | | | | | SLRAGDTAVYYCARVLYDSSGFYNWFDP | |
| | | | | | | | | | WGQGTLVTVSS | |
| CoV2- | Ab | SARS-CoV1, | | | SARS-CoV2 | S; RBD | B-cells; SARS-CoV2 | 449 | QVQLQESGPGLVKPSQTLSLTCTVSGGSI | 1528 |
| 2464 | | SARS-CoV2 | | | | | Human Patient | | SSGGYYWSWIRQHPGKGLEWIGYISYS | |
| | | | | | | | | | GSTYYNPSLKSRLTISVDTSKNQFSLKLSS | |
| | | | | | | | | | VTAADTAVYYCARDLGDGYNLRVPAYF | |
| | | | | | | | | | DLWGRGTLVTVSS | |
| CoV2- | Ab | SARS-CoV1, | | | SARS-CoV2 | S; RBD | B-cells; SARS-CoV2 | 450 | QVQLQESGPGLVKPSGTLSLTCAVSGGS | 1529 |
| 2465 | | SARS-CoV2 | | | | | Human Patient | | ISSSNWWSWVRQPPGKGLEWIGEIYHG | |
| | | | | | | | | | GSTDYNPSLKSRVTISVDKSKNQFSLKLTS | |
| | | | | | | | | | VTAADTAVYYCARVDHVNVRDYWGPG | |
| | | | | | | | | | TLVTVSS | |
| CoV2- | Ab | SARS-CoV2 | SARS- | | SARS-CoV1, | S; NTD | B-cells; SARS-CoV2 | 451 | EVQLVESGGGLVKPGGSLRLSCAASGFT | 1530 |
| 2466 | | | CoV1 | | SARS-CoV2 | | Human Patient | | FSSYSMNWVRQAPGKGLEWVSSISNSN | |
| | | | | | | | | | SFIYYADSMKGRFTISRDNAKNSLYLQM | |
| | | | | | | | | | NSLRAEDTAVYYCARVNGNSNWNFGSY | |
| | | | | | | | | | YYYYMDVWGKGTTVTVSS | |
| CoV2- | Ab | SARS-CoV2 | SARS- | | SARS-CoV1, | S; non- | B-cells; SARS-CoV2 | 452 | QVQLVESGGGVVQPGRSLRLSCAASGF | 1531 |
| 2473 | | | CoV1 | | SARS-CoV2 | RBD | Human Patient | | TFSNYGMHWVRQAPGKGLEWVAVIYY | |
| | | | | | | | | | DGSNKYYADSVKGRFTISRDNSKNTLYL | |
| | | | | | | | | | QIHSLRAEDTAVYYCAREGQMAATTGID | |
| | | | | | | | | | YWGQGTLVTVSS | |
| CoV2- | Ab | SARS-CoV2 | SARS- | | SARS-CoV1, | S; non- | B-cells; SARS-CoV2 | 453 | EVQLVESGGGLVKPGGSLRLSCAASGFT | 1532 |
| 2474 | | | CoV1 | | SARS-CoV2 | RBD | Human Patient | | FSNAWMSWVRQAPGKGLEWVGRIKG | |
| | | | | | | | | | KTDGGTTDYAAPVKGRFTISKDDSKNTL | |
| | | | | | | | | | YLQMSSLNTEDTAVYWCTTLTYYYDSSA | |
| | | | | | | | | | YLNDAFDIWGQGTMVTVSS | |

| | | | | | | SEQ | | SEQ | | |
|---|---|---|---|---|---|---|---|---|---|---|
| | | Heavy V | Heavy J | Light V | Light J | ID | | ID | | |
| Name | VL | Gene | Gene | Gene | Gene | NO.: | CDRH3 | NO.: | CDRL3 | Sources |
| CoV2- | DIQMTQSPSSLSASVGDRVTITCQASQ | IGHV3-30 | IGHJ4 | IGKV1-33 | IGKJ5 | 2528 | AKQGGLYCSG | 3730 | QQYHNLP | Seth Zost et al., 2020 |
| 2450 | DISNYLHWYQQKPGKAPKLLIYDASNL | (Human) | (Human) | (Human) | (Human) | | TNCWGGYLD | | PIT | (https://www.nature.co |
| | ETGVPSRFSGSGSGTDFTFTISSLQPED | | | | | | Y | | | m/articles/s41591-020- |
| | IATYYCQQYHNLPPITFGQGTRLEIK | | | | | | | | | 0998-x) |
| CoV2- | SYELTQPPSVSVSPGQTASITCSGDKLG | IGHV2-5 | IGHJ4 | IGLV3-1 | IGLJ1 | 2529 | VHRHVSGAF | 3731 | QAWDSST | Seth Zost et al., 2020 |
| 2451 | ETYVSWYQQKPGQSPVLVIYEDSKRPS | (Human) | (Human) | (Human) | (Human) | | DY | | GGI | (https://www.nature.co |
| | GIPERFSGSNSGNTATLTISGTQAMDE | | | | | | | | | m/articles/s41591-020- |
| | ADYYCQAWDSSTGGVFGTGTKVTVL | | | | | | | | | 0998-x) |
| CoV2- | DIQMTQSPSSLSASVGDRVTITCQASL | IGHV7-4- | IGHJ3 | IGKV1-33 | IGKJ5 | 2530 | ARARLLGYCS | 3732 | QQYDNLP | Seth Zost et al., 2020 |
| 2453 | DISKYLNWYQHKPGKAPNLLIYDAFNL | 1 | (Human) | (Human) | (Human) | | STSCYTIGWG | | PGVSTT | (https://www.nature.co |
| | ERGVPSRFSGSGSGTDFTFTISSLQPED | (Human) | | | | | AFDI | | | m/articles/s41591-020- |
| | IATYYCQQYDNLPPGVSTTFGQGTRLE | | | | | | | | | 0998-x) |
| | IK | | | | | | | | | |
| CoV2- | SYELTQPPSVSVSPGQTARITCSGDALP | (Human) | IGHJ4 | IGLV3-10 | IGLJ3 | 2531 | AREGQGTYLD | 3733 | CSTDSSGN | Seth Zost et al., 2020 |
| 2454 | KKYAHWYQQKSGQAPVLVIYEDSKRP | IGHV3-33 | (Human) | (Human) | (Human) | | Y | | QRV | (https://www.nature.co |
| | SGIPERFSGSSSGTMATLTISGAQVED | | | | | | | | | m/articles/s41591-020- |
| | EADYYCCSTDSSGNQRVFGGGTKLTVL | | | | | | | | | 0998-x) |
| CoV2- | QSALTQPASVSGSPGQSITISCTGTSSD | IGHV3-48 | IGHJ4 | IGLV2-14 | IGLJ2 | 2532 | AREARSRYFD | 3734 | SSYTSSST | Seth Zost et al., 2020 |
| 2455 | IGGYNYVSWYQQHPGKAPKLLIYDVS | (Human) | (Human) | (Human) | (Human) | | WLPSYYFDY | | HVV | (https://www.nature.co |
| | NRPSGVSTRFSGSKSGNTASLTISGLQ | | | | | | | | | m/articles/s41591-020- |
| | AEDEADYYCSSYTSSSTHVVFGGGTKL | | | | | | | | | 0998-x) |
| | TVL | | | | | | | | | |
| CoV2- | SYELTQPPSVSVSPGQTARITCSGDALP | IGHV3-30 | IGHJ4 | IGLV3-25 | IGLJ2 | 2533 | ARDPSPLVLIT | 3735 | QSADTIGT | Seth Zost et al., 2020 |
| 2458 | RQYTYWYQQKPGQAPVLVIYKDSERP | (Human) | (Human) | (Human) | (Human) | | SIDY | | YWV | (https://www.nature.co |
| | SGIPERFSGSSSGTTVTLTISGVQAEDE | | | | | | | | | m/articles/s41591-020- |
| | ADYYCQSADTIGTYWVFGGGTKLTVL | | | | | | | | | 0998-x) |
| CoV2- | EIVMTQSPATVSVSPGERATLSCRASQ | IGHV4-39 | IGHJ5 | IGKV3-15 | IGKJ2 | 2534 | ARRGNYYDSK | 3736 | QQYNNWP | Seth Zost et al., 2020 |
| 2459 | SVSSNLAWYQQKPGQAPRLLIYGAST | (Human) | (Human) | (Human) | (Human) | | NWFDP | | PMYT | (https://www.nature.co |
| | RATGIPARFSASGSGTEFTLTISSLQSED | | | | | | | | | m/articles/s41591-020- |
| | FAVYYCQQYNNWPPMYTFGQGTKVE | | | | | | | | | 0998-x) |
| | IK | | | | | | | | | |
| CoV2- | DIQMTQSPSSLSASVGDRVTITCQASQ | IGHV4-31 | IGHJ4 | IGKV1-33 | IGKJ2 | 2535 | ARGGSGSYSL | 3737 | QQYDNLYS | Seth Zost et al., 2020 |
| 2461 | DITNYLNWYQQKPGKAPKLLIYDASNL | (Human) | (Human) | (Human) | (Human) | | FDY | | VH | (https://www.nature.co |
| | ETGVPSRFSGSGSGTDFTFTISSLQPED | | | | | | | | | m/articles/s41591-020- |
| | FATYYCQQYDNLYSVHFGQGTKLEIK | | | | | | | | | 0998-x) |
| CoV2- | DIQMTQSPSSLSASVGDRVTITCRASQ | IGHV3-13 | IGHJ5 | IGKV1-39 | IGKJ1 | 2536 | ARVLYDSSGF | 3738 | QQSYEMP | Seth Zost et al., 2020 |
| 2462 | SISSYLNWYQQKPGKAPKLLIYAASSLK | (Human) | (Human) | (Human) | (Human) | | YNWFDP | | PWT | (https://www.nature.co |
| | SGVPSRFGGSGSGTDFTLTISSLQPEDF | | | | | | | | | m/articles/s41591-020- |
| | ATYYCQQSYEMPPWTFGQGTKVEIE | | | | | | | | | 0998-x) |
| CoV2- | SYELTQPPSVSVSPGQTARITCSGDALP | IGHV4-31 | IGHJ2 | IGLV3-25 | IGLJ1 | 2537 | ARDLGDGYN | 3739 | QSADSSGY | Seth Zost et al., 2020 |
| 2464 | NQYAYWYHQKPGQAPVVVIYKDSER | (Human) | (Human) | (Human) | (Human) | | LRVPAYFDL | | V | (https://www.nature.co |
| | PSGIPQRFSGSSSGTTVTLTISGVQAED | | | | | | | | | m/articles/s41591-020- |
| | EADYYCQSADSSGYVFGTGTKVTVL | | | | | | | | | 0998-x) |
| CoV2- | QSALTQPASVSGSPGQSITISCTGTSSD | IGHV4-4 | IGHJ4 | IGLV2-14 | IGLJ1 | 2538 | ARVDHVNVR | 3740 | SSYTSSS | Seth Zost et al., 2020 |
| 2465 | VGGYNYVSWYQQHPGKAPKLMIYDV | (Human) | (Human) | (Human) | (Human) | | DY | | IPYV | (https://www.nature.co |
| | SKRPSGVSNRFSGSKSGNTASLTISGLQ | | | | | | | | | m/articles/s41591-020- |
| | AEDEADYYCSSYTSSSIPYVFGTGTKVT | | | | | | | | | 0998-x) |
| | VL | | | | | | | | | |
| CoV2- | EIVLTQSPAILSLSPGERATLSCRASQSV | IGHV3-21 | IGHJ6 | IGKV3-11 | IGKJ1 | 2539 | ARVNGNSN | 3741 | QQRGNW | Seth Zost et al., 2020 |
| 2466 | SSYLAWYQQKPGQAPRLLIYDTSNRAT | (Human) | (Human) | (Human) | (Human) | | WNFGSYYYYY | | WT | (https://www.nature.co |
| | GIPARFSGSGSGTDFTLTISSLEPEDFAF | | | | | | MDV | | | m/articles/s41591-020- |
| | YYCQQRGNWWTFAQGTKVEIK | | | | | | | | | 0998-x) |
| CoV2- | SYELTQPPSVSVSPRQTARITCSGDALP | IGHV3-33 | IGHJ4 | IGLV3-10 | IGLJ3 | 2540 | AREGQMAAT | 3742 | YSTDTSGN | Seth Zost et al., 2020 |
| 2473 | KKYAYWYQQKSGQAPVLVIYEDSKRP | (Human) | (Human) | (Human) | (Human) | | TGIDY | | HWV | (https://www.nature.co |
| | SGIPERFSGSSSGTMATLTISGAQVED | | | | | | | | | m/articles/s41591-020- |
| | EADYYCYSTDTSGNHWVFGGGTKLTV | | | | | | | | | 0998-x) |
| | L | | | | | | | | | |
| CoV2- | SYELTQPPSVSVSPGQTARITCSGDALP | IGHV3-15 | IGHJ3 | IGLV3-10 | IGLJ3 | 2541 | TTLTYYYDSSA | 3743 | YSTDSSGN | Seth Zost et al., 2020 |
| 2474 | KKYAYWYQQKSGQAPVLVISEDSKRP | (Human) | (Human) | (Human) | (Human) | | YLNDAFDI | | HRV | (https://www.nature.co |
| | SGIPERFSGSSSGTVATLTISGAQVEDE | | | | | | | | | m/articles/s41591-020- |
| | ADYYCYSTDSSGNHRVFGGGTKLTVL | | | | | | | | | 0998-x) |

| | | | | | Not | | | | | |
|---|---|---|---|---|---|---|---|---|---|---|
| | Ab | | | Neutral- | Neutral- | | | SEQ | | SEQ |
| | or | | Doesn't | ising | ising | Protein + | | ID | | ID |
| Name | Nb | Binds to | Bind to | Vs | Vs | Epitope | Origin | NO.: | VH or VHH | NO.: |
| CoV2- | Ab | SARS-CoV1, | | | SARS-CoV2 | S; non- | B-cells; SARS-CoV2 | 454 | EVQLVESGGGLVQPGRSLRLSCAASGFT | 1533 |
| 2478 | | SARS-CoV2 | | | | RBD | Human Patient | | FDDYAMHWVRQAPGKGLEWVSGISW | |
| | | | | | | | | | NSDNIGYADSVKGRFTISRDIAKNSLYLQ | |
| | | | | | | | | | MNSLRAEDTALYYCAKGIYYDIFMPLLD | |
| | | | | | | | | | WGRGTLVTVSS | |
| CoV2- | Ab | SARS-CoV2 | SARS- | SARS-CoV2 | | S; RBD | B-cells; SARS-CoV2 | 455 | QVQLVQSGAEVKKPGSSVKVSCKTSGD | 1534 |
| 2479 | | | CoV1 | | | | Human Patient | | TSSSYTVGWVRQAPGQGLEWMGRIIPI | |
| | | | | | | | | | LGIAYSAQKFQGRLTITADKSTSTSYMEL | |
| | | | | | | | | | SSLRSEDTAVYYCARGVVAATPGWFDP | |
| | | | | | | | | | WGQGTLVTVSS | |
| CoV2- | Ab | SARS-CoV1, | | | SARS-CoV2 | S; non- | B-cells; SARS-CoV2 | 456 | QVQLVQSGAEVKKPGSSVKVSCKASGG | 1535 |
| 2481 | | SARS-CoV2 | | | | RBD | Human Patient | | TFGSYVISWVRQAPGQGLQWMGGIIPI | |
| | | | | | | | | | FGKPNYAQKFQGRVTITADESTSTAYME | |
| | | | | | | | | | LSSLRSEDTAVYYCARGWFGELLKGTYW | |
| | | | | | | | | | FDPWGQGTLVTVSS | |
| CoV2- | Ab | SARS-CoV2 | SARS- | SARS-CoV2 | | S; RBD | B-cells; SARS-CoV2 | 457 | QVQLVQSGAEVKKPGSSVKVSCKASGG | 1536 |
| 2485 | | | CoV1 | (weak) | | | Human Patient | | TFSSYSITWVRQAPGQGLEWMGRIIPVL | |
| | | | | | | | | | GIANYAQKFQDRVTITADKSTSTAYMEL | |
| | | | | | | | | | SSLRSEDTAVYYCARVGVSGFKSGSNWY | |
| | | | | | | | | | FDLWGRGTLVTVSS | |
| CoV2- | Ab | SARS-CoV2 | SARS- | | SARS-CoV1, | S; non- | B-cells; SARS-CoV2 | 458 | EVQLVESGGGLVQPGGSLRLSCAVSGFT | 1537 |
| 2488 | | | CoV1 | | SARS-CoV2 | RBD | Human Patient | | FSSYWMHWVRQAPGKGLVWVSRINSD | |
| | | | | | | | | | GSSTSYADSVKGRFTISRDNAKNTLYLQ | |
| | | | | | | | | | MNSLRAEDTAVYYCAREVEQLAHMVDY | |
| | | | | | | | | | WGQGTLVTVSS | |
| CoV2- | Ab | SARS-CoV2 | SARS- | SARS-CoV2 | | S; NTD | B-cells; SARS-CoV2 | 459 | QLQLQESGPGLVKPSETLSLTCTVSGGSI | 1538 |
| 2489 | | | CoV1 | (weak) | | | Human Patient | | SSTTYYWGWIRQPPGKGLEWIASIYYSG | |
| | | | | | | | | | STYYNPSLKSRLTVSVDTSKNQFSLKLSSV | |
| | | | | | | | | | TAADTAVYYCARQWKWFGEAWYFDL | |
| | | | | | | | | | WGRGTLVTVSS | |
| CoV2- | Ab | SARS-CoV2 | SARS- | | SARS-CoV1, | S; NTD | B-cells; SARS-CoV2 | 460 | EVQLVESGGGLVQPGGSLRLSCAASGFT | 1539 |
| 2490 | | | CoV1 | | SARS-CoV2 | | Human Patient | | FSSYWMNWVRQAPGKGLEWVANINQ | |
| | | | | | | | | | DGGEKYYVDSVRGRFTISRDNAKNSLYL | |
| | | | | | | | | | QMNSLRAEDTAVYYCARDPYDLYGDYG | |
| | | | | | | | | | GTFDYWGQGTLVTVSS | |
| CoV2- | Ab | SARS-CoV2 | SARS- | | SARS-CoV1, | S; NTD | B-cells; SARS-CoV2 | 461 | QVQLVQSGAAVKKPGSSVKVSCKASGG | 1540 |
| 2495 | | | CoV1 | | SARS-CoV2 | | Human Patient | | TFSSYAISWVRQAPGQGLEWMGGIVPI | |
| | | | | | | | | | FGTANYAQKFQGRVTITADESTTTAYME | |
| | | | | | | | | | LNSLRSEDTAVYYCAREDYYGSGSLVDPY | |
| | | | | | | | | | YYYRMDVWGQGTTVTVSS | |
| CoV2- | Ab | SARS-CoV2 | SARS- | | SARS-CoV1, | S; non- | B-cells; SARS-CoV2 | 462 | QVQLVESGGGVVQPGRSLRLSCAASGF | 1541 |
| 2496 | | | CoV1 | | SARS-CoV2 | RBD | Human Patient | | TFSNYGMHWVRQAPGKGLEWVAVIW | |
| | | | | | | | | | YDGSNKYYADSVKGRFTISRDNSKNTLYL | |
| | | | | | | | | | QMNSLRAEDTAVYYCVRDLALFEVVIQ | |
| | | | | | | | | | QGVWGQGTLVTVSS | |
| CoV2- | Ab | SARS-CoV2 | SARS- | SARS-CoV2 | | S; RBD | B-cells; SARS-CoV2 | 463 | QLQLQESGPGLVKPSETLSLTCTVSGGSV | 1542 |
| 2499 | | | CoV1 | | | | Human Patient | | SSRSYYWGWIRQPPGKGLEWIGSIYYSG | |
| | | | | | | | | | STYYNPSLKSRVTISVDTSKNQFSLKLSSV | |
| | | | | | | | | | TAADTAVYYCARHTVDCGGDCFPNDAF | |
| | | | | | | | | | DIWGQGTMVTVSS | |
| CoV2- | Ab | SARS-CoV2 | SARS- | SARS-CoV2 | | S; RBD | B-cells; SARS-CoV2 | 464 | QVQLVQSGAEVKKPGASVKVSCKASGY | 1543 |
| 2504 | | | CoV1 | | | | Human Patient | | TFTDYYMHWVRQAPGQGLEWMGWI | |
| | | | | | | | | | NPNSRGTNYAQKFQGRVTMTRDTSIST | |
| | | | | | | | | | VYMELSRLTSDDTAVYYCARVVVLGYGR | |
| | | | | | | | | | PNNYYDGRNVWDYWGQGTLVTVSS | |
| CoV2- | Ab | SARS-CoV1, | | | SARS-CoV2 | S; non- | B-cells; SARS-CoV2 | 465 | QVQLVESGGGVVQPGRSLRLSCAASGFI | 1544 |
| 2509 | | SARS-CoV2 | | | | RBD | Human Patient | | FSTYAMHWVRQAPGKGLEWVAVISYD | |
| | | | | | | | | | GDNKYYADSVKGRFTISRDNSKNTLYLE | |
| | | | | | | | | | MNSLRAEDTAVYYCARPRGGSYQTCFD | |
| | | | | | | | | | YWGQGTLVTVSS | |
| CoV2- | Ab | SARS-CoV2 | SARS- | | SARS-CoV1, | S; RBD | B-cells; SARS-CoV2 | 466 | QVQLVQSGSELKKPGASVKVSCKASGYT | 1545 |
| 2510 | | | CoV1 | | SARS-CoV2 | | Human Patient | | FTSHTMNWVRQAPGQGLEWMGWIN | |
| | | | | | | | | | TNTGNPMYAQGFTGRFVFSLDTSGSTA | |
| | | | | | | | | | YLQISSLKAEDTAVYYCARWGPDYGDYA | |
| | | | | | | | | | SNDYWGQGTLVTVSS | |
| CoV2- | Ab | SARS-CoV1, | | SARS-CoV2 | | S; RBD | B-cells; SARS-CoV2 | 467 | EVQLVESGGGVVRPGGSLRLSCAASGFI | 1546 |
| 2514 | | SARS-CoV2 | | (weak) | | | Human Patient | | FDDYDMTWVRQAPGKGLEWVSGINW | |
| | | | | | | | | | NGGSTGYADSVKGRFTISRDNAKNSLYL | |
| | | | | | | | | | QMNSLRAEDTALYHCAVIMSPIPRYSGY | |
| | | | | | | | | | DWAGDAFDIWGQGTMVTVSS | |

| | | | | | | SEQ | | SEQ | | |
|---|---|---|---|---|---|---|---|---|---|---|
| | | Heavy V | Heavy J | Light V | Light J | ID | | ID | | |
| Name | VL | Gene | Gene | Gene | Gene | NO.: | CDRH3 | NO.: | CDRL3 | Sources |
| CoV2- | EIVLTQSPGTLSLSPGERATLSCRASQS | IGHV3-9 | IGHJ4 | IGKV3-20 | IGKJ2 | 2542 | AKGIYYDIFM | 3744 | HQYGTSPY | Seth Zost et al., 2020 |
| 2478 | VSSTFLAWYQQKPGQAPRLLIFGASSR | (Human) | (Human) | (Human) | (Human) | | PLLD | | T | (https://www.nature.co |
| | ATGIPDRFSGSGSGTDFTLTISRLEPED | | | | | | | | | m/articles/s41591-020- |
| | FAVYYCHQYGTSPYTFGQGTKLEIK | | | | | | | | | 0998-x) |
| CoV2- | EIVMTQSPATLSVSPGERVTLSCRASQ | IGHV1-69 | IGHJ5 | IGKV3-15 | IGKJ4 | 2543 | ARGVVAATP | 3745 | QQYNNFLT | Seth Zost et al., 2020 |
| 2479 | SVSSNLAWYQQKPGQAPRLLIYGAST | (Human) | (Human) | (Human) | (Human) | | GWFDP | | | (https://www.nature.co |
| | RATGIPARFSGGGSGTEFTLTISSLQSE | | | | | | | | | m/articles/s41591-020- |
| | DFAVYYCQQYNNFLTFGGGTKVEIK | | | | | | | | | 0998-x) |
| CoV2- | DIVMTQSPDSLAVSLGERATINCKSSQ | IGHV1-69 | IGHJ5 | IGKV4-1 | IGKJ2 | 2544 | ARGWFGELL | 3746 | QQYYSTPG | Seth Zost et al., 2020 |
| 2481 | SVLYSSNNKNYLAWYQQKPGQPPKLLI | (Human) | (Human) | (Human) | (Human) | | KGTYWFDP | | | (https://www.nature.co |
| | YWASTRESGVPDRFSGSGSGTDFTLTI | | | | | | | | | m/articles/s41591-020- |
| | SSLQAEDVAVYYCQQYYSTPGFGQGT | | | | | | | | | 0998-x) |
| | KLEIK | | | | | | | | | |
| CoV2- | QSVLTQPPSVSGAPGQRVTLSCTGSNS | IGHV1-69 | IGHJ2 | IGLV1-40 | IGLJ3 | 2545 | ARVGVSGFKS | 3747 | QSYDSSLS | Seth Zost et al., 2020 |
| 2485 | NIGAGYDVHWYQQLPGTAPKLLIYGN | (Human) | (Human) | (Human) | (Human) | | GSNWYFDL | | DSV | (https://www.nature.co |
| | SNRPSGVPDRFSGSKSGTSASLAITGL | | | | | | | | | m/articles/s41591-020- |
| | QAEDEADYYCQSYDSSLSDSVFGGGT | | | | | | | | | 0998-x) |
| | KVTVL | | | | | | | | | |
| CoV2- | SYELTQPPSVSVSPGQTARITCSGDALP | IGHV3-74 | IGHJ4 | IGLV3-25 | IGLJ3 | 2546 | AREVEQLAH | 3748 | QSADSSGT | Seth Zost et al., 2020 |
| 2488 | NQYAYWYQQKPGQAPVLVIYKDSERP | (Human) | (Human) | (Human) | (Human) | | MVDY | | SWV | (https://www.nature.co |
| | SGIPERFSGSSSGTTVTLTISGVQAEDE | | | | | | | | | m/articles/s41591-020- |
| | ADYYCQSADSSGTSWVFGGGTKLTVL | | | | | | | | | 0998-x) |
| CoV2- | EIVLTQSPGTLSLSPGERASLSCRASQS | IGHV4-39 | IGHJ2 | IGKV3-20 | IGKJ4 | 2547 | ARQWKWFG | 3749 | QQYGSSPF | Seth Zost et al., 2020 |
| 2489 | VSSSYLAWYQQKPGQAPRLLIYGASSR | (Human) | (Human) | (Human) | (Human) | | EAWYFDL | | T | (https://www.nature.co |
| | ATGIPDRFSGSGSGTDFTLTISRLEPED | | | | | | | | | m/articles/s41591-020- |
| | FAVYYCQQYGSSPFTFGGGTKVEIK | | | | | | | | | 0998-x) |
| CoV2- | DIQMTQSPSTLSASVGDRVTITCRASQ | IGHV3-7 | IGHJ4 | IGKV1-5 | IGKJ4 | 2548 | ARDPYDLYGD | 3750 | QQYNSYSL | Seth Zost et al., 2020 |
| 2490 | SISSWLAWYQQKPRKAPKLLIYKASTLE | (Human) | (Human) | (Human) | (Human) | | YGGTEDY | | T | (https://www.nature.co |
| | SGVPSRFSGSGSGTEFTLTISSLQPDDF | | | | | | | | | m/articles/s41591-020- |
| | ATYYCQQYNSYSLTFGGGTKVEIK | | | | | | | | | 0998-x) |
| CoV2- | EIVLTQSPATLSVSPGERATLSCRASQS | IGHV1-69 | IGHJ6 | IGKV3-15 | IGKJ1 | 2549 | AREDYYGSGS | 3751 | QQYNNW | Seth Zost et al., 2020 |
| 2495 | VSSNLAWYQQKPGQAPRLLIYGASTR | (Human) | (Human) | (Human) | (Human) | | LVDPYYYYRM | | WRT | (https://www.nature.co |
| | ATGIPARFSGSGSGTDFTLTISSLQSED | | | | | | DV | | | m/articles/s41591-020- |
| | FALYYCQQYNNWWRTFGQGTKVEIN | | | | | | | | | 0998-x) |
| CoV2- | SYELTQPPSVSVSPGQTARITCSGDALP | IGHV3-33 | IGHJ4 | IGLV3-10 | IGLJ3 | 2550 | VRDLALFEVVI | 3752 | YSTDSSGN | Seth Zost et al., 2020 |
| 2496 | KKYAYWYQQKSGQAPVLVIYEDSKRP | (Human) | (Human) | (Human) | (Human) | | QQGV | | HWV | (https://www.nature.co |
| | SGIPERFSGSSSGTMATLTISGAQVED | | | | | | | | | m/articles/s41591-020- |
| | EADYYCYSTDSSGNHWVFGGGTKLTV | | | | | | | | | 0998-x) |
| | L | | | | | | | | | |
| CoV2- | SSELTQDPAVSVALGQTVRITCQGDSL | IGHV4-39 | IGHJ3 | IGLV3-19 | IGLJ2 | 2551 | ARHTVDCGG | 3753 | NFRDSSGH | Seth Zost et al., 2020 |
| 2499 | RSYYASWYQQKPGQAPLLVIYGKNNR | (Human) | (Human) | (Human) | (Human) | | DCFPNDAFDI | | HPV | (https://www.nature.co |
| | PSGIPDRFSGSSSGNTPSLTITGAQAED | | | | | | | | | m/articles/s41591-020- |
| | EADYYCNFRDSSGHHPVFGEGTKLTVL | | | | | | | | | 0998-x) |
| CoV2- | QSVLTQPPSASGTPGQRVIISCSGSSSN | IGHV1-2 | IGHJ4 | IGLV1-44 | IGLJ2 | 2552 | ARVVVLGYGR | 3754 | AAWDDSL | Seth Zost et al., 2020 |
| 2504 | IGSNTVKWYHQLPGTAPKLLICSNNQR | (Human) | (Human) | (Human) | (Human) | | PNNYYDGRN | | NALV | (https://www.nature.co |
| | PSGVPDRFSGSKSDTSASLAISGLQSED | | | | | | VWDY | | | m/articles/s41591-020- |
| | EADYYCAAWDDSLNALVFGGGTKLTV | | | | | | | | | 0998-x) |
| | L | | | | | | | | | |
| CoV2- | EIVMTQSPATLSVSPGERATLSCRASQ | IGHV3-30- | IGHJ4 | IGKV3-15 | IGKJ1 | 2553 | ARPRGGSYQT | 3755 | QQYNNWP | Seth Zost et al., 2020 |
| 2509 | SVSSNLAWYQQKPGQAPRLLIYGAST | 3 | (Human) | (Human) | (Human) | | CFDY | | GT | (https://www.nature.co |
| | RATGIPARFSGSGSGTEFTLTISSLQSE | (Human) | | | | | | | | m/articles/s41591-020- |
| | DFAVYYCQQYNNWPGTFGQGTKVEI | | | | | | | | | 0998-x) |
| | K | | | | | | | | | |
| CoV2- | SYELTQPSSVSVSPGQTARITCSGDVLA | IGHV7-4- | IGHJ4 | IGLV3-27 | IGLJ2 | 2554 | ARWGPDYGD | 3756 | YSAADNN | Seth Zost et al., 2020 |
| 2510 | KNYARWFQQKPGQAPVLVIYKDSERP | 1 | (Human) | (Human) | (Human) | | YASNDY | | RV | (https://www.nature.co |
| | SGIPKRFSGSSSGTTVTLTISGAQVEDE | (Human) | | | | | | | | m/articles/s41591-020- |
| | ADYYCYSAADNNRVFGGGTKLTVL | | | | | | | | | 0998-x) |
| CoV2- | SSELTQDPAVSVALGQTVRITCQGDSL | IGHV3-20 | IGHJ3 | IGLV3-19 | IGLJ2 | 2555 | AVIMSPIPRYS | 3757 | NSRDSSGN | Seth Zost et al., 2020 |
| 2514 | RSYYASWYQQKPGQVPILVIYDKNNR | (Human) | (Human) | (Human) | (Human) | | GYDWAGDAF | | AVV | (https://www.nature.co |
| | PSGIPDRFSGSSSGNTASLTITGAQAED | | | | | | DI | | | m/articles/s41591-020- |
| | EADYYCNSRDSSGNAVVFGGGTKLTV | | | | | | | | | 0998-x) |
| | L | | | | | | | | | |

| | | | | | Not | | | | | |
|---|---|---|---|---|---|---|---|---|---|---|
| | Ab | | | Neutral- | Neutral- | | | SEQ | | SEQ |
| | or | | Doesn't | ising | ising | Protein + | | ID | | ID |
| Name | Nb | Binds to | Bind to | Vs | Vs | Epitope | Origin | NO.: | VH or VHH | NO.: |
| CoV2 | Ab | SARS-CoV1, | | | SARS-CoV2 | S; non- | B-cells; SARS-CoV2 | 468 | QVQLVQSGSELKKPGASVKVSCKASGYT | 1547 |
| 2515 | | SARS-CoV2 | | | | RBD | Human Patient | | FTTYAMNWVRQAPGQGLEWMGWIN | |
| | | | | | | | | | TNTGNPTYAQDFTGRFVFSLDTSVSTAYL | |
| | | | | | | | | | QISSLKAEDTAVYYCARGLVGRIDPWGQ | |
| | | | | | | | | | GTLVTVSS | |
| CoV2- | Ab | SARS-CoV1, | | | SARS-CoV2 | S; RBD | B-cells; SARS-CoV2 | 469 | QVQLVQSGAEVKKPGASVKVSCKASGY | 1548 |
| 2516 | | SARS-CoV2 | | | | | Human Patient | | TFTNYYMHWVRQAPGQGLEWMGILN | |
| | | | | | | | | | PGAGSTSYAQKFQGRVTMTSDTSTNTV | |
| | | | | | | | | | YMQLSSLKSEDTAVYYCARDQQIVPHAD | |
| | | | | | | | | | GFDIWGQGTMVTVSS | |
| CoV2- | Ab | SARS-CoV1, | | | SARS-CoV2 | S; non- | B-cells; SARS-CoV2 | 470 | QVQLVQSGAEVRKPGSSVKVSCKASGG | 1549 |
| 2517 | | SARS-CoV2 | | | | RBD | Human Patient | | TFSSYAISWVRQAPGQGLEWMGGIIPV | |
| | | | | | | | | | FGTANYAQKFQGRVTITADKSTSTAFME | |
| | | | | | | | | | LNSLRSEDTAVYYCARIGSYPEYFQHWG | |
| | | | | | | | | | QGTLVTVSS | |
| CoV2 | Ab | SARS-CoV2 | SARS- | | SARS-CoV1, | S; RBD | B-cells; SARS-CoV2 | 471 | EVQLVESGGGLVQPGRSLRLSCAASGFT | 1550 |
| 2518 | | | CoV1 | | SARS-CoV2 | | Human Patient | | FDDYAMHWVRQAPGKGLEWVSGISW | |
| | | | | | | | | | NSGTIGYADSVKGRFIISRDNAKNSLYLQ | |
| | | | | | | | | | MNSLRPEDTALYYCAKDIIRQGEDGMD | |
| | | | | | | | | | VWGQGTTVTVSS | |
| CoV2- | Ab | SARS-CoV1, | | | SARS-CoV2 | S; non- | B-cells; SARS-CoV2 | 472 | EVQLVESGGGLVQPGGSLRLSCAASGFT | 1551 |
| 2520 | | SARS-CoV2 | | | | RBD | Human Patient | | FSSYWMSWVRQAPGKGLEWVANIKED | |
| | | | | | | | | | GSEKYYVDSVKGRFTISRDNAKNSLYLQ | |
| | | | | | | | | | MNSLRAEDTAVYYCARDVGGYSGYDLG | |
| | | | | | | | | | FDYYYYMDVWGKGTTVTVSS | |
| CoV2- | Ab | SARS-CoV2 | SARS- | | SARS-CoV1, | S; non- | B-cells; SARS-CoV2 | 473 | QVQLVESGGGVVQPGRSLRLACAASGF | 1552 |
| 2521 | | | CoV1 | | SARS-CoV2 | RBD | Human Patient | | TFSSYGMHWVRQAPGKGLEWVAVISY | |
| | | | | | | | | | DGNNKYYADSLKGRFTISRDDSKNTLYL | |
| | | | | | | | | | QMNSLRAEDTAVYYCAKDRTAVFLFFGL | |
| | | | | | | | | | GDAFDIWGQGTMVTVSS | |
| CoV2- | Ab | SARS-CoV1, | | | SARS-CoV2 | S; non- | B-cells; SARS-CoV2 | 474 | EVQLVQSGAEVKKPGESLKISCKGSGYSF | 1553 |
| 2524 | | SARS-CoV2 | | | | RBD | Human Patient | | TSHWIGWVRQMPGKGLEWMGIIYPG | |
| | | | | | | | | | DSDTRYSPSFQGQVTISADKSISTAYLQW | |
| | | | | | | | | | SSLKASDTAMYYCASALRERGVQLWSV | |
| | | | | | | | | | WGQGTLVTVSS | |
| CoV2- | Ab | SARS-CoV2 | SARS- | | SARS-CoV1, | S; NTD | B-cells; SARS-CoV2 | 475 | EVRLLESGGGLVQPGGSLRLSCAASGFT | 1554 |
| 2525 | | | CoV1 | | SARS-CoV2 | | Human Patient | | FTSYAMSWVRQAPGKGLQWVSTISVSG | |
| | | | | | | | | | GSTYYADSVKGRFTISRDNSKNTLYLQM | |
| | | | | | | | | | NSLRAEDTAVYYCAKDPASGIVGPTHFD | |
| | | | | | | | | | YWGQGTLVTVSS | |
| CoV2- | Ab | SARS-CoV2 | SARS- | | SARS-CoV1, | S; NTD | B-cells; SARS-CoV2 | 476 | QVQLVQSGAEVKKPGASVKVSCKVSGY | 1555 |
| 2526 | | | CoV1 | | SARS-CoV2 | | Human Patient | | TLTELSIHWVRQAPGKGLEWMGGFDP | |
| | | | | | | | | | EDAETIYAQQFQGRVTMTEDTSTDTAY | |
| | | | | | | | | | MELSSLKSEDTALYYCATGFAVFGRAAV | |
| | | | | | | | | | PYWGQGTLVTVSS | |
| CoV2- | Ab | SARS-CoV2 | SARS- | | SARS-CoV1, | S; RBD | B-cells; SARS-CoV2 | 477 | QVQLQESGPGLVKPSQTLSLTCTVSGGSI | 1556 |
| 2527 | | | CoV1 | | SARS-CoV2 | | Human Patient | | SSGDYYWSWIRQPPGKGLEWIGYIYYSG | |
| | | | | | | | | | STYYNPSLKSRVTISVDTSKNQVSLKLSSV | |
| | | | | | | | | | TAADTAVYYCARFRRSYGSGSYYNISFDY | |
| | | | | | | | | | WGQGTLVTVSS | |
| CoV2- | Ab | SARS-CoV2 | SARS- | | SARS-CoV1, | S; non- | B-cells; SARS-CoV2 | 478 | QVQLVQSGSELKKPGASVKVSCKASGYT | 1557 |
| 2529 | | | CoV1 | | SARS-CoV2 | RBD | Human Patient | | FTRHAMNWVRQAPGQGLEWMGWIN | |
| | | | | | | | | | TNTGNPTYAQGFTGRFVFSLDTSVSTAY | |
| | | | | | | | | | LQISSLKAEDTAVYYCVREYGSGHPLPIW | |
| | | | | | | | | | GQGTLVTVSS | |
| CoV2- | Ab | SARS-CoV2 | SARS- | SARS-CoV2 | | S; RBD | B-cells; SARS-CoV2 | 479 | QVQLQESGPGLVKPSETLSLTCSVSGGSI | 1558 |
| 2531 | | | CoV1 | | | | Human Patient | | RSYFWNWVRQPPGKGLEWIGYIYYSGS | |
| | | | | | | | | | TNYKPSFKSRVTISLDTSKNQISLKLSSVT | |
| | | | | | | | | | AADTAVYYCARATWLRDAFGIWGQGT | |
| | | | | | | | | | MVTVSS | |
| CoV2- | Ab | SARS-CoV2 | SARS- | | SARS-CoV1, | S; RBD | B-cells; SARS-CoV2 | 480 | QVQLVQSGAEVKKPGASVRVSCKAPGY | 1559 |
| 2532 | | | CoV1 | | SARS-CoV2 | | Human Patient | | TFTTYYIHWVRQAPGQGLEWMGIINPS | |
| | | | | | | | | | AGSTTYAQKFQGRVTMTRDTSTSTVYM | |
| | | | | | | | | | ELSSLRSEDTAVYYCARGFHVPAALRNW | |
| | | | | | | | | | FDPWGQGTLVTVSS | |
| CoV2- | Ab | SARS-CoV2 | SARS- | | SARS-CoV1, | S; NTD | B-cells; SARS-CoV2 | 481 | QVQLQESGPGLVKPSQTLSLTCTVSGGSI | 1560 |
| 2533 | | | CoV1 | | SARS-CoV2 | | Human Patient | | SSGGYYWSWIRQHPGKGLEWIGYIYYS | |
| | | | | | | | | | GSTYYNPSLKSRVTISVDTSKNQFSLKLTS | |
| | | | | | | | | | VTAADTAVYYCAREANDSGSFYNGPFDY | |
| | | | | | | | | | WGQGTLVTVSS | |

| | | | | | | SEQ | | SEQ | | |
|---|---|---|---|---|---|---|---|---|---|---|
| | | Heavy V | Heavy J | Light V | Light J | ID | | ID | | |
| Name | VL | Gene | Gene | Gene | Gene | NO.: | CDRH3 | NO.: | CDRL3 | Sources |
| CoV2 | DIQMTQSPSSLSASVGDRVTITCQASQ | IGHV7-4- | IGHJ5 | IGKV1-33 | IGKJ3 | 2556 | ARGLVGRIDP | 3758 | QQYDNLL | Seth Zost et al., 2020 |
| 2515 | DISNSLSWYQQKPGKAPKLLIYDASNL | 1 | (Human) | (Human) | (Human) | | | | LFT | (https://www.nature.co |
| | KTGVPSRFSGSGSGTDFTFTISSLQPED | (Human) | | | | | | | | m/articles/s41591-020- |
| | IATYYCQQYDNLLLFTFGPGTKVDIK | | | | | | | | | 0998-x) |
| CoV2- | EIVLTQSPATLSLSPGERATLSCRASQS | IGHV1-46 | IGHJ3 | IGKV3-11 | IGKJ1 | 2557 | ARDQQIVPH | 3759 | QQRSNWP | Seth Zost et al., 2020 |
| 2516 | VSSYLAWYQQKPGQAPRLLIYDASNR | (Human) | (Human) | (Human) | (Human) | | ADGFDI | | PRTWT | (https://www.nature.co |
| | ATGIPARFSGSGSGTDFTLTISSLEPEDF | | | | | | | | | m/articles/s41591-020- |
| | AVYYCQQRSNWPPRTWTFGQGTKVE | | | | | | | | | 0998-x) |
| | IK | | | | | | | | | |
| CoV2- | EIVLTQSPATLSLSPGERATLSCRASQS | IGHV1-69 | IGHJ1 | IGKV3-11 | IGKJ4 | 2558 | ARIGSYPEY | 3760 | HYRSNWP | Seth Zost et al., 2020 |
| 2517 | VSSFLAWYQQKPGQAPRLLIYDASNR | (Human) | (Human) | (Human) | (Human) | | FQH | | PVLT | (https://www.nature.co |
| | ATGIPARFSGSGSGTDFTLTISSLEPEDF | | | | | | | | | m/articles/s41591-020- |
| | AVYYCHYRSNWPPVLTFGGGTKVEIE | | | | | | | | | 0998-x) |
| CoV2 | SSELTQDPAVSVALGQTVRITCQGDSL | IGHV3-9 | IGHJ6 | IGLV3-19 | IGLJ2 | 2559 | AKDIIRQGED | 3761 | NSRDSS | Seth Zost et al., 2020 |
| 2518 | RSYYASWYQQKPGQVPILVIYDKNNR | (Human) | (Human) | (Human) | (Human) | | GMDV | | GNAVV | (https://www.nature.co |
| | PSGIPDRFSGSSSGNTASLTITGAQAED | | | | | | | | | m/articles/s41591-020- |
| | EADYYCNSRDSSGNAVVFGGGTKLTV | | | | | | | | | 0998-x) |
| | A | | | | | | | | | |
| CoV2- | SSELTQDPAVSVALGQTVRITCQGDSL | IGHV3-7 | IGHJ6 | IGLV3-19 | IGLJ3 | 2560 | ARDVGGYSG | 3762 | NSRDSS | Seth Zost et al., 2020 |
| 2520 | RSYYANWYQQKPGQAPVVVIFGKNN | (Human) | (Human) | (Human) | (Human) | | YDLGFDYYYY | | GYIWGWM | (https://www.nature.co |
| | RPSGIPDRFSGSNSGNTASLTITGAQA | | | | | | MDV | | | m/articles/s41591-020- |
| | EDEADYYCNSRDSSGYIWGWMFGGG | | | | | | | | | 0998-x) |
| | TKLTVL | | | | | | | | | |
| CoV2- | SYVLTQPPSVSVAPGKTARITCGGNNI | IGHV3-30 | IGHJ3 | IGLV3-21 | IGLJ3 | 2561 | AKDRTAVFLF | 3763 | QVWDSSS | Seth Zost et al., 2020 |
| 2521 | GSKSVHWYQQKPGQAPVVVVYDDSD | (Human) | (Human) | (Human) | (Human) | | FGLGDAFDI | | DHWV | (https://www.nature.co |
| | RPSGLPERFSGSNSGNTATLTISRVEA | | | | | | | | | m/articles/s41591-020- |
| | GDEADYYCQVWDSSSDHWVFGGGT | | | | | | | | | 0998-x) |
| | KLTVL | | | | | | | | | |
| CoV2- | QSVLTQPPSVSGAPGQRVTISCTGSSS | IGHV5-51 | IGHJ4 | IGLV1-40 | IGLJ3 | 2562 | ASALRERGVQ | 3764 | QSYDSS | Seth Zost et al., 2020 |
| 2524 | NIGAGYDVHWYQQLPGTAPKLLIFINS | (Human) | (Human) | (Human) | (Human) | | LWSV | | LGAL | (https://www.nature.co |
| | NRPSGVPDRFSGSKSGTSASLAITGLQ | | | | | | | | | m/articles/s41591-020- |
| | AEDEADYYCQSYDSSLGALFGGGTKLT | | | | | | | | | 0998-x) |
| | VL | | | | | | | | | |
| CoV2- | QLVLTQSPSASASLGASVKLTCTLSSGH | IGHV3-23 | IGHJ4 | IGLV4-69 | IGLJ3 | 2563 | AKDPASGIVG | 3765 | QSWDTGI | Seth Zost et al., 2020 |
| 2525 | TTYAIAWHQQQPEKGPRYLMKLNSD | (Human) | (Human) | (Human) | (Human) | | PTHFDY | | GV | (https://www.nature.co |
| | GSHTRGDGIPDRFSGSSSGAERYLTISS | | | | | | | | | m/articles/s41591-020- |
| | LQSEDEADYYCQSWDTGIGVFGGGTK | | | | | | | | | 0998-x) |
| | LTVL | | | | | | | | | |
| CoV2- | SYELTQPPSVSVSPGQTASITCFGDKLG | IGHV1-24 | IGHJ4 | IGLV3-1 | IGLJ2 | 2564 | ATGFAVFGRA | 3766 | QAWDSST | Seth Zost et al., 2020 |
| 2526 | DKYACWFQQKPGQSPVLIIYQGAKRP | (Human) | (Human) | (Human) | (Human) | | AVPY | | VV | (https://www.nature.co |
| | SGIPERFSGSNSGNTATLTISGTQAMD | | | | | | | | | m/articles/s41591-020- |
| | EADYYCQAWDSSTVVFGGGTKLTVL | | | | | | | | | 0998-x) |
| CoV2- | QSALTQPASVSGSPGQSITISCTGTSSD | IGHV4-30- | IGHJ4 | IGLV2-23 | IGLJ2 | 2565 | ARFRRSYGSG | 3767 | CSYVGS | Seth Zost et al., 2020 |
| 2527 | VGSYNLVSWYQQHPGKAPKLMIYEVS | 4 | (Human) | (Human) | (Human) | | SYYNISFDY | | STYVV | (https://www.nature.co |
| | KRPSGVSNRFSGSKSGNTASLTISGLQ | (Human) | | | | | | | | m/articles/s41591-020- |
| | AEDEADYYCCSYVGSSTYVVFGGGTKL | | | | | | | | | 0998-x) |
| | TVL | | | | | | | | | |
| CoV2- | SYELTQPPSVSVSPGQTARITCSADALS | IGHV7-4- | IGHJ4 | IGLV3-25 | IGLJ3 | 2566 | VREYGSGHPL | 3768 | QSADSS | Seth Zost et al., 2020 |
| 2529 | KQYAYWYQQKPGQAPVVVIYKDSERP | 1 | (Human) | (Human) | (Human) | | PI | | SHWV | (https://www.nature.co |
| | SGIPERFSGSSSGTTVTLTISGVQAEDE | (Human) | | | | | | | | m/articles/s41591-020- |
| | ADYYCQSADSSSHWVFGGGTKLTVL | | | | | | | | | 0998-x) |
| CoV2- | NFMLTQPHSVSESPGKTVTISCTGNSG | IGHV4-59 | IGHJ3 | IGLV6-57 | IGLJ2 | 2567 | ARATWLRDA | 3769 | QSFDSG | Seth Zost et al., 2020 |
| 2531 | SIASNYVQWYQQRPGSAPTTVIYEDS | (Human) | (Human) | (Human) | (Human) | | FGI | | NVV | (https://www.nature.co |
| | QRPSGVPDRFSGSIDSSSNSASLTISGL | | | | | | | | | m/articles/s41591-020- |
| | KTEDEADYYCQSFDSGNVVFGGGTKL | | | | | | | | | 0998-x) |
| | TVL | | | | | | | | | |
| CoV2- | QSVLTQPPSASGTPGQRVTISCSGSSS | IGHV1-46 | IGHJ5 | IGLV1-44 | IGLJ2 | 2568 | ARGFHVPAA | 3770 | VAWDDSR | Seth Zost et al., 2020 |
| 2532 | NIGSNTVNWYQQLPGTAPKLLIYNNN | (Human) | (Human) | (Human) | (Human) | | LRNWFDP | | NGLV | (https://www.nature.co |
| | QRPSGVPDRLSGSKSGTSASLAISGLQ | | | | | | | | | m/articles/s41591-020- |
| | SEDEADYYCVAWDDSRNGLVFGGGT | | | | | | | | | 0998-x) |
| | KLTVL | | | | | | | | | |
| CoV2- | DIVMTQSPDSLAVSLGERATINCKSSQ | IGHV4-31 | IGHJ4 | IGKV4-1 | IGKJ2 | 2569 | AREANDSGS | 3771 | QQYYST | Seth Zost et al., 2020 |
| 2533 | SVLYSSNNKNYLAWYQQKPGQPPKLLI | (Human) | (Human) | (Human) | (Human) | | FYNGPFDY | | RT | (https://www.nature.co |
| | YWASTRESGVPDRFSGSGSGTDFTLTI | | | | | | | | | m/articles/s41591-020- |
| | SSLQAEDVAVYYCQQYYSTRTFGQGT | | | | | | | | | 0998-x) |
| | KLEIK | | | | | | | | | |

| | | | | | Not | | | | | |
|---|---|---|---|---|---|---|---|---|---|---|
| | Ab | | | Neutral- | Neutral- | | | SEQ | | SEQ |
| | or | | Doesn't | ising | ising | Protein + | | ID | | ID |
| Name | Nb | Binds to | Bind to | Vs | Vs | Epitope | Origin | NO.: | VH or VHH | NO.: |
| CoV2- | Ab | SARS-CoV1, | | | SARS-CoV2 | S; non- | B-cells; SARS-CoV2 | 482 | QVQLQESGPGLVKPSQTLSLTCTVSGGSI | 1561 |
| 2536 | | SARS-CoV2 | | | | RBD | Human Patient | | SSGSYYWSWIRQPAGKGLEWIGRIFTSG | |
| | | | | | | | | | STNYNPSLKSRVTISVDTSKNQFSLKLSSV | |
| | | | | | | | | | TAADTAVYYCARGGLLWFGGAGNYMD | |
| | | | | | | | | | VWGKGTTVTVSS | |
| CoV2- | Ab | SARS-CoV2 | SARS- | SARS-CoV2 | | S; RBD | B-cells; SARS-CoV2 | 483 | QVQLAQSGAEVKKPGASVKVSCKAGGY | 1562 |
| 2539 | | | CoV1 | | | | Human Patient | | TFTSYDINWVRQATGQGLEWMGWMN | |
| | | | | | | | | | SNSGNAGYAQKFQGRVTMTRDTSISTA | |
| | | | | | | | | | YMELSSLRSEDTAVYYCARMRTGWPTH | |
| | | | | | | | | | GRPDDFWGRGTLVTVSS | |
| CoV2- | Ab | SARS-CoV2 | SARS- | | SARS-CoV1, | S; non- | B-cells; SARS-CoV2 | 484 | QVQIQQWGAGVLKPSETLSLTCAVYGG | 1563 |
| 2545 | | | CoV1 | | SARS-CoV2 | RBD | Human Patient | | SFSGHYWSWIRQPPGKGLEWIGEINHS | |
| | | | | | | | | | GSTKYNPSLKSRVTISVDTSKNQFSLKLSS | |
| | | | | | | | | | VTAADTAVYYCARGPPVTTFFVFSLLFDP | |
| | | | | | | | | | WGQGTLVTVSS | |
| CoV2- | Ab | SARS-CoV2 | SARS- | | SARS-CoV1, | S; non- | B-cells; SARS-CoV2 | 485 | QVQLVESGGGVVQPGRSLRLSCAASGF | 1564 |
| 2546 | | | CoV1 | | SARS-CoV2 | RBD | Human Patient | | TFSSYGMHWVRQAPGKGLEWVAVISY | |
| | | | | | | | | | DGRNKYYADSVKGRFTISRDNSKNTLYL | |
| | | | | | | | | | QMSSLRAEDTAVYYCAKEGEWELRGNA | |
| | | | | | | | | | LDIWGQGTMVTVSS | |
| CoV2- | Ab | SARS-CoV2 | SARS- | | SARS-CoV1, | S; non- | B-cells; SARS-CoV2 | 486 | QVQLVESGGGVVQPGRSLRLSCAASGF | 1565 |
| 2549 | | | CoV1 | | SARS-CoV2 | RBD | Human Patient | | TFSSYGMHWVRQAPDKGLEWVAVIWY | |
| | | | | | | | | | DGSNKYYADSVKGRFTISRDNSKNTLYL | |
| | | | | | | | | | QMNSLRAEDTAVYYCAREGQWPNQAF | |
| | | | | | | | | | DIWGQGTMVTVSS | |
| CoV2- | Ab | SARS-CoV1, | | | SARS-CoV2 | S; non- | B-cells; SARS-CoV2 | 487 | QVQLQESGPGLVKPSETLSLTCTVSGGSI | 1566 |
| 2551 | | SARS-CoV2 | | | | RBD | Human Patient | | SSSSYYWGWIRQPPGKGLEWIGSIYYSG | |
| | | | | | | | | | SSYYSPSLKSRVTISADTSKNQFSLNLRSV | |
| | | | | | | | | | TAADTAVYYCASGPPYMATFSYYFDYW | |
| | | | | | | | | | GQGTLVTVSS | |
| CoV2- | Ab | SARS-CoV1, | | SARS-CoV2 | | S; RBD | B-cells; SARS-CoV2 | 488 | QVQLVESGGGLVKPGGSLRLSCAASGFT | 1567 |
| 2552 | | SARS-CoV2 | | (weak) | | | Human Patient | | FSDYYMSWIRQAPGKGLECVSYISSSGST | |
| | | | | | | | | | IYYADSVKGRFTISRDNAKNSLYLQMNSL | |
| | | | | | | | | | RAEDTAVYYCARDPIRDGVWGLNENDY | |
| | | | | | | | | | WGQGTLVTVSS | |
| CoV2- | Ab | SARS-CoV2 | SARS- | | SARS-CoV1, | S; non- | B-cells; SARS-CoV2 | 489 | QVQLVESGGGVVQPGRSLRLSCAASGFI | 1568 |
| 2553 | | | CoV1 | | SARS-CoV2 | RBD | Human Patient | | FSSYAMHWVRQAPGKGLEWVAVISYD | |
| | | | | | | | | | GSNKYYADSVKGRFTISRDNSKNTLYLQ | |
| | | | | | | | | | MNSLRAEDTAVYYCARSPPASYYNPSTG | |
| | | | | | | | | | YFDYWGQGTLVTVSS | |
| CoV2- | Ab | SARS-CoV1, | | | SARS-CoV2 | S; RBD | B-cells; SARS-CoV2 | 490 | QVQLVQSGAEVKKPGASVKVSCKASGY | 1569 |
| 2554 | | SARS-CoV2 | | | | | Human Patient | | TFTSHYMHWVRQAPGQGLEWMGIINP | |
| | | | | | | | | | SGGSTSYAQKFQGRVTMTSDTSTSTVY | |
| | | | | | | | | | MELSSLRSEDTAMYYCARDVFWVPAAS | |
| | | | | | | | | | SFDYWGQGTLVTVSS | |
| CoV2- | Ab | SARS-CoV2 | SARS- | | SARS-CoV1, | S; NTD | B-cells; SARS-CoV2 | 491 | QVQLVESGGGVVQPGRSLRLSCAASGF | 1570 |
| 2558 | | | CoV1 | | SARS-CoV2 | | Human Patient | | TFSSYAMHWVRQAPGKGLEWVAVISY | |
| | | | | | | | | | DGSNKYYADSVKGRFTISRDNSKNTLYL | |
| | | | | | | | | | QMNSLRVEDTAVYYCARDQEWFRELFL | |
| | | | | | | | | | FDYWGQGTLVTVSS | |
| CoV2- | Ab | SARS-CoV2 | SARS- | SARS-CoV2 | | S; RBD | B-cells; SARS-CoV2 | 492 | QVQLAQSGAEVKKPGASVKVSCKAAGY | 1571 |
| 2562 | | | CoV1 | | | | Human Patient | | TFTSYDINWVRQATGQGLEWMGWMN | |
| | | | | | | | | | SNSGNAGYAQKFQGRVTMTRDTSTSTA | |
| | | | | | | | | | YMELSSLTSDDTAVYYCARMRTGWPTH | |
| | | | | | | | | | GRPDDFWGRGTLVTVSS | |
| CoV2- | Ab | SARS-CoV2 | SARS- | | SARS-CoV1, | S; NTD | B-cells; SARS-CoV2 | 493 | QVQLQQWGAGLLKPSETLSLTCAVYGG | 1572 |
| 2563 | | | CoV1 | | SARS-CoV2 | | Human Patient | | SFSGYYWSWIRQPPGKGLEWIGEINHS | |
| | | | | | | | | | GSSNYNPSLKSRVTISVDTSKNQFSLKLSS | |
| | | | | | | | | | VTAADTAVYYCARGWGWGAVAGRAEY | |
| | | | | | | | | | YFDYWGQGTLVTVSS | |
| CoV2- | Ab | SARS-CoV1, | | | SARS-CoV2 | S; non- | B-cells; SARS-CoV2 | 494 | QVQLVESGGGVVQPGRSLRLSCAASGF | 1573 |
| 2564 | | SARS-CoV2 | | | | RBD | Human Patient | | TFSSYAMHWVRQAPGKGLEWVAVISY | |
| | | | | | | | | | DGYNKYYADSVKGRFTISRDNSKNTLYL | |
| | | | | | | | | | QMNSLRAEDTAVYYCARAQGGNYYYG | |
| | | | | | | | | | MDVWGQGTTVTVSS | |
| CoV2- | Ab | SARS-CoV1, | | | SARS-CoV2 | S; non- | B-cells; SARS-CoV2 | 495 | QVQLQESGPGLVKPSQTLSLTCTVSGGSI | 1574 |
| 2565 | | SARS-CoV2 | | | | RBD | Human Patient | | SSGSYYWSWIRQPAGKGLEWIGRVYIYS | |
| | | | | | | | | | SGSTNYNPSLKSRVTISVDTSKNQFSLKLS | |
| | | | | | | | | | SVTAADTAVYYCARGAASFDYWGQGTL | |
| | | | | | | | | | VTVSS | |

| | | | | | | SEQ | | SEQ | | |
|---|---|---|---|---|---|---|---|---|---|---|
| | | Heavy V | Heavy J | Light V | Light J | ID | | ID | | |
| Name | VL | Gene | Gene | Gene | Gene | NO.: | CDRH3 | NO.: | CDRL3 | Sources |
| CoV2- | DIVMTQSPDSLAVSLGERATINCKSSQ | IGHV4-61 | IGHJ6 | IGKV4-1 | IGKJ2 | 2570 | ARGGLLWFG | 3772 | QQYYSTPP | Seth Zost et al., 2020 |
| 2536 | SVLYSSNNKNYLAWYQQKPGQPPKLLI | (Human) | (Human) | (Human) | (Human) | | GAGNYMDV | | YT | (https://www.nature.co |
| | YWASTRESGVPDRFSGSGSGTDFTLTI | | | | | | | | | m/articles/s41591-020- |
| | SSLQAEDVAVYYCQQYYSTPPYTFGQG | | | | | | | | | 0998-x) |
| | TKVEIK | | | | | | | | | |
| CoV2- | QSVLTQPPSASGTPGQRVTISCSGSNS | IGHV1-8 | IGHJ4 | IGLV1-44 | IGLJ3 | 2571 | ARMRTGWPT | 3773 | LAWDDSL | Seth Zost et al., 2020 |
| 2539 | NIGSYTVNWYQQFPGTAPKLLIYDNN | (Human) | (Human) | (Human) | (Human) | | HGRPDDF | | NGLV | (https://www.nature.co |
| | QRTSGVPDRFSGSKSGTSASLAISGLQ | | | | | | | | | m/articles/s41591-020- |
| | SEDEASYYCLAWDDSLNGLVFGGGTK | | | | | | | | | 0998-x) |
| | LTVL | | | | | | | | | |
| CoV2- | QSVLTQPPSASGTPGQRVTISCSGSSS | IGHV4-34 | IGHJ5 | IGLV1-47 | IGLJ3 | 2572 | ARGPPVTTFF | 3774 | AAWDASL | Seth Zost et al., 2020 |
| 2545 | NIGSNYVYWYQQLPGTAPKLLIYSSNQ | (Human) | (Human) | (Human) | (Human) | | VFSLLFDP | | SGWV | (https://www.nature.co |
| | RPSGVPDRFSGSKSGTSASLAISGLRSE | | | | | | | | | m/articles/s41591-020- |
| | DEADYYCAAWDASLSGWVFGGGTKL | | | | | | | | | 0998-x) |
| | TVL | | | | | | | | | |
| CoV2- | SYELTQPPSVSVSPGQTARITCSADALP | IGHV3-30 | IGHJ3 | IGLV3-25 | IGLJ3 | 2573 | AKEGEWELR | 3775 | QSVDGSGS | Seth Zost et al., 2020 |
| 2546 | KHYAYWYQQRPGQAPVLVIYKDIERP | (Human) | (Human) | (Human) | (Human) | | GNALDI | | SVV | (https://www.nature.co |
| | SGIPERFSGSSSGTTVTLTITGAQAEDE | | | | | | | | | m/articles/s41591-020- |
| | ADYYCQSVDGSGSSVVFGGGTKLAVL | | | | | | | | | 0998-x) |
| CoV2- | SYELTQPPSVSVSPGQTASITCSGDKLG | IGHV3-33 | IGHJ3 | IGLV3-1 | IGLJ2 | 2574 | AREGQWPN | 3776 | QAWDSST | Seth Zost et al., 2020 |
| 2549 | DKYACWYQQKPGQSPVLVIHQDSQR | (Human) | (Human) | (Human) | (Human) | | QAFDI | | HVV | (https://www.nature.co |
| | PSGIPERFSGSNSGNTATLTISGTQAM | | | | | | | | | m/articles/s41591-020- |
| | DEADYYCQAWDSSTHVVFGGGTKLT | | | | | | | | | 0998-x) |
| | VL | | | | | | | | | |
| CoV2- | QSALTQPASVSGSPGQSITISCTGTSSD | IGHV4-39 | IGHJ4 | IGLV2-14 | IGLJ1 | 2575 | ASGPPYMATF | 3777 | SSYTSSSTP | Seth Zost et al., 2020 |
| 2551 | VGGYNYVSWFQHHPDKAPRLMIYDV | (Human) | (Human) | (Human) | (Human) | | SYYFDY | | FV | (https://www.nature.co |
| | SKRPSGVSNRFSGSKSGNTASLTISGLQ | | | | | | | | | m/articles/s41591-020- |
| | AEDEADYYCSSYTSSSTPFVFGTGTKVT | | | | | | | | | 0998-x) |
| | VL | | | | | | | | | |
| CoV2- | QPVLTQSSSASASLGSSVKLTCTLSSGH | IGHV3-11 | IGHJ4 | IGLV4-60 | IGLJ3 | 2576 | ARDPIRDGV | 3778 | ETWDSNT | Seth Zost et al., 2020 |
| 2552 | SSYIIAWHQQQPGKAPRYLMKLEGSG | (Human) | (Human) | (Human) | (Human) | | WGLNENDY | | RV | (https://www.nature.co |
| | SYNKGSGVPDRFSGSSSGADCYLTISN | | | | | | | | | m/articles/s41591-020- |
| | LQSEDEADYYCETWDSNTRVFAGGTK | | | | | | | | | 0998-x) |
| | LTVL | | | | | | | | | |
| CoV2- | DIQMTQSPSSLSASVGDRVTITCRASQ | IGHV3-30 | IGHJ4 | IGKV1-39 | IGKJ2 | 2577 | ARSPPASYYN | 3779 | QQSYSTP | Seth Zost et al., 2020 |
| 2553 | SISSYLNWYQQKPGKAPKLLIYAASSLQ | (Human) | (Human) | (Human) | (Human) | | PSTGYFDY | | MHT | (https://www.nature.co |
| | SGVPSRFSGSGSGTDFTLTISSLQPEDF | | | | | | | | | m/articles/s41591-020- |
| | ATFYCQQSYSTPMHTFGQGTKLEIK | | | | | | | | | 0998-x) |
| CoV2- | DIQLTQSPSFLSASVGDRVTITCRASQG | IGHV1-46 | IGHJ4 | IGKV1-9 | IGKJ1 | 2578 | ARDVFWVPA | 3780 | QQLNSYLG | Seth Zost et al., 2020 |
| 2554 | ISSYLAWYQQKPGKAPKLLIYAASTLQS | (Human) | (Human) | (Human) | (Human) | | ASSFDY | | T | (https://www.nature.co |
| | GVPSRFSGSGSGTEFTLTISSLQPEDFA | | | | | | | | | m/articles/s41591-020- |
| | TYYCQQLNSYLGTFGQGTKVEIK | | | | | | | | | 0998-x) |
| CoV2- | DIQMTQSPSSVSASVGDRVTITCRASQ | IGHV3-30- | IGHJ4 | IGKV1-12 | IGKJ3 | 2579 | ARDQEWFRE | 3781 | QQANSFPP | Seth Zost et al., 2020 |
| 2558 | GISSWLAWYQQKPGKAPKLLIYDASSL | 3 | (Human) | (Human) | (Human) | | LFLFDY | | T | (https://www.nature.co |
| | QSGVPSRFSGSGSGTDFTLTISSLQPED | (Human) | | | | | | | | m/articles/s41591-020- |
| | FATYYCQQANSFPPTFGPGTKVDIK | | | | | | | | | 0998-x) |
| CoV2- | QSVLTQPPSASGTPGQRVTISCSGSNS | IGHV1-8 | IGHJ4 | IGLV1-44 | IGLJ2 | 2580 | ARMRTGWPT | 3782 | LVWDDSL | Seth Zost et al., 2020 |
| 2562 | NIGSYTVNWYQQFPGTAPKLLIYDNN | (Human) | (Human) | (Human) | (Human) | | HGRPDDF | | NGLV | (https://www.nature.co |
| | QRTSGVPDRFSGSKSGTSASLAISGLQ | | | | | | | | | m/articles/s41591-020- |
| | SEDEANYYCLVWDDSLNGLVFGGGTK | | | | | | | | | 0998-x) |
| | LTVL | | | | | | | | | |
| CoV2- | QSALTQPASVSGSPGQSITISCTGTSSD | IGHV4-34 | IGHJ4 | IGLV2-23 | IGLJ1 | 2581 | ARGWGWGA | 3783 | CSYAGSST | Seth Zost et al., 2020 |
| 2563 | VGSYNLVSWYQQHPGKAPKLMIYEVS | (Human) | (Human) | (Human) | (Human) | | VAGRAEYYFD | | WG | (https://www.nature.co |
| | KRPSGVSNRFSGSKSGNTASLTISGLQ | | | | | | Y | | | m/articles/s41591-020- |
| | AEDEADYYCCSYAGSSTWGFGTGTKV | | | | | | | | | 0998-x) |
| | TVL | | | | | | | | | |
| CoV2- | SYVLTQPPSVSVAPGKTARITCGGNNI | IGHV3-30- | IGHJ6 | IGLV3-21 | IGLJ2 | 2582 | ARAQGGNYY | 3784 | QVWDSSS | Seth Zost et al., 2020 |
| 2564 | GTKGVHWYQQKPGQAPVLVVYDDS | 3 | (Human) | (Human) | (Human) | | YGMDV | | DHHVV | (https://www.nature.co |
| | DRPSGIPGRFSGSNSGNTATLTISRVEA | (Human) | | | | | | | | m/articles/s41591-020- |
| | GDEADYFCQVWDSSSDHHVVFGGGT | | | | | | | | | 0998-x) |
| | KLTVL | | | | | | | | | |
| CoV2- | DIVMTQSPLSLPVTPGEPASISCRSSQS | IGHV4-61 | IGHJ4 | IGKV2-28 | IGKJ4 | 2583 | ARGAASFDY | 3785 | MQALQTP | Seth Zost et al., 2020 |
| 2565 | LLHSDGYTYLDWYLQKPGQSPQLLIYL | (Human) | (Human) | (Human) | (Human) | | | | LT | (https://www.nature.co |
| | GSKRASGVPDRFSGSGSGTDFTLKISR | | | | | | | | | m/articles/s41591-020- |
| | VEAEDVGVYYCMQALQTPLTFGGGTK | | | | | | | | | 0998-x) |
| | VEIK | | | | | | | | | |

| | | | | | Not | | | | | |
|---|---|---|---|---|---|---|---|---|---|---|
| | Ab | | | Neutral- | Neutral- | | | SEQ | | SEQ |
| | or | | Doesn't | ising | ising | Protein + | | ID | | ID |
| Name | Nb | Binds to | Bind to | Vs | Vs | Epitope | Origin | NO.: | VH or VHH | NO.: |
| CoV2- | Ab | SARS-CoV2 | SARS- | | SARS-CoV1, | S; non- | B-cells; SARS-CoV2 | 496 | QLQLQESGPGLVKPSETLSLTCTVSGGSI | 1575 |
| 2570 | | | CoV1 | | SARS-CoV2 | RBD | Human Patient | | SSSSNYWGWIRQPPGKGLEWIGSIYYSG | |
| | | | | | | | | | STYYNPSLKSRVTISVDTSKNQFSLKLSSV | |
| | | | | | | | | | TAADTAVYYCARDPRVVVTARMYNWF | |
| | | | | | | | | | DPWGQGTLVTVSS | |
| CoV2- | Ab | SARS-CoV2 | SARS- | | SARS-CoV1, | S; NTD | B-cells; SARS-CoV2 | 497 | QVQLQESGPGLVKPSETLSLTCTVSGGSL | 1576 |
| 2571 | | | CoV1 | | SARS-CoV2 | | Human Patient | | SSYYWSWIRQPPGKGLEWIGYIYDSGG | |
| | | | | | | | | | ASRSTNYNPSLKSRVTISVDTSRNQLSLKL | |
| | | | | | | | | | SSVTAADTAVYYCARDQRQFQLLGRFG | |
| | | | | | | | | | WFDPWGQGTLVTVSS | |
| CoV2- | Ab | SARS-CoV2 | SARS- | | SARS-CoV1, | S; non- | B-cells; SARS-CoV2 | 498 | QLQLQESGPGLVKPSETLSLTCTVSGGSI | 1577 |
| 2574 | | | CoV1 | | SARS-CoV2 | RBD | Human Patient | | SSTTYYWGWIRQPPGKGLEWIASIYYSG | |
| | | | | | | | | | STYYNPSLKSRLTVSVDTSKNQFSLKLSSV | |
| | | | | | | | | | TAADTAVYYCARQWKWFGEAWYFDL | |
| | | | | | | | | | WGRGTLVTVSS | |
| CoV2- | Ab | SARS-CoV2 | SARS- | | SARS-CoV1, | S; non- | B-cells; SARS-CoV2 | 499 | QVQLVQSGSELKKPGASVKVSCKASGYT | 1578 |
| 2582 | | | CoV1 | | SARS-CoV2 | RBD | Human Patient | | FTTYAMNWVRQAPGQGLEWMGWIN | |
| | | | | | | | | | TNTGNPTYAQGFTGRFVFSLDTSVNTAF | |
| | | | | | | | | | LHIGSLKAEDTAVYYCARDQDSGYPTYYY | |
| | | | | | | | | | YYMDVWGKGTTVTVSS | |
| CoV2- | Ab | SARS-CoV1, | | | SARS-CoV2 | S; non- | B-cells; SARS-CoV2 | 500 | QVQLVQSGAEVKKPGASVKVSCKASGY | 1579 |
| 2583 | | SARS-CoV2 | | | | RBC | Human Patient | | TFTSYDMNWVRQATGQGLEWMGWM | |
| | | | | | | | | | NPNSGNTGYAQKFQGRVTMTRNTSIST | |
| | | | | | | | | | AYMELSSLRSEDTAVYYCARGGIYYLVRG | |
| | | | | | | | | | FIIGYYGMDVWGQGTTVTVSS | |
| CoV2- | Ab | SARS-CoV2 | SARS- | | SARS-CoV1, | S; non- | B-cells; SARS-CoV2 | 501 | EVALVESGGGLVKPGGSLRLSCAASGFIF | 1580 |
| 2584 | | | CoV1 | | SARS-CoV2 | RBD | Human Patient | | SNAWMTWVRQAPGKGLEWVGRIKSK | |
| | | | | | | | | | SEGGTPEYAAPVKGRFIISRDDSTNSLHL | |
| | | | | | | | | | QMNYLRIEDTAVYYCTTGGYSSYAASDY | |
| | | | | | | | | | WGQGTLVTVSS | |
| CoV2- | Ab | SARS-CoV2 | SARS- | | SARS-CoV1, | S; RBD | B-cells; SARS-CoV2 | 502 | EVQLVESGGGLVQPGGSLRLSCAASGFT | 1581 |
| 2585 | | | CoV1 | | SARS-CoV2 | | Human Patient | | FSSYSMNWVRQAPGKGLEWVSYISSRS | |
| | | | | | | | | | STIKYADSVKGRFTISRDNAKNSLYLQM | |
| | | | | | | | | | NSLRDEDTAVYYCARVDYYGSGSVYWYF | |
| | | | | | | | | | DLWGRGTLVTVSS | |
| CoV2- | Ab | SARS-CoV2 | SARS- | | SARS-CoV1, | S; non- | B-cells; SARS-CoV2 | 503 | EVQLVESGGGLVQPGRSLRLSCAASGFT | 1582 |
| 2586 | | | CoV1 | | SARS-CoV2 | RBD | Human Patient | | FDDYAMHWVRQAPGKGLEWVSGISW | |
| | | | | | | | | | NSGSIAYADSVKGRFTISRDNAKNSLYLQ | |
| | | | | | | | | | MNSLRAEDTALYFCAKVGWELSIDAFDL | |
| | | | | | | | | | WGQGTMVTVSS | |
| CoV2- | Ab | SARS-CoV1, | | | SARS-CoV2 | S; non- | B-cells; SARS-CoV2 | 504 | QITFKESGPTLVKPTETLTLTCTFSGFSVS | 1583 |
| 2587 | | SARS-CoV2 | | | | RBC | Human Patient | | TSGEGVGWIRQPPGKALEWLAVIYWD | |
| | | | | | | | | | DDKRYSPSLKSRLTITRDTSKNQVVLTMT | |
| | | | | | | | | | NMDPVDTATYYCAHRLWFRDAFDIWG | |
| | | | | | | | | | QGTTVTVSS | |
| CoV2- | Ab | SARS-CoV2 | SARS- | SARS-CoV2 | | S; RBD | B-cells; SARS-CoV2 | 505 | QVTLRESGPALVKPTQTLTLTCTFSGFSLS | 1584 |
| 2589 | | | CoV1 | (weak) | | | Human Patient | | TSGMCVSWIRQPPGKALEWLARIDWD | |
| | | | | | | | | | DDKYYSTSLETRLTISKDTSKNQVVLTMT | |
| | | | | | | | | | NMDPVDTATYYCARIQYQLNGMDVW | |
| | | | | | | | | | GQGTTVTVSS | |
| CoV2- | Ab | SARS-CoV1, | | | SARS-CoV2 | S; non- | B-cells; SARS-CoV2 | 506 | QVQLVQSGAEVKKPGASVKVSCKASGY | 1585 |
| 2590 | | SARS-CoV2 | | | | RBD | Human Patient | | TFSSYDINWVRQATGQGLEWMGWVN | |
| | | | | | | | | | PNSGHTGYAQKFQGRVTMTRNTSVSTA | |
| | | | | | | | | | YMELSSLRSEDTAVFYCARGRVGYVGSG | |
| | | | | | | | | | SRGYYYYYDMDVWGQGTTVTVSS | |
| CoV2- | Ab | SARS-CoV1, | | | SARS-CoV2 | S; non- | B-cells; SARS-CoV2 | 507 | EVQLVQSGAEVKKPGESLKISCKGSGYSF | 1586 |
| 2602 | | SARS-CoV2 | | | | RBD | Human Patient | | TSYWIGWVRQMPGKGLEWMGIIYPGD | |
| | | | | | | | | | SDTRYSPSFQGQVTISADKSISTAYLQWS | |
| | | | | | | | | | SLKASDTAMYYCARPDYSSGWFSYWYF | |
| | | | | | | | | | DLWGRGTLVTVSS | |
| CoV2- | Ab | SARS-CoV1, | | | SARS-CoV2 | S; non- | B-cells; SARS-CoV2 | 508 | QVQLVQSGSALKKPGASVKVSCKASGYT | 1587 |
| 2610 | | SARS-CoV2 | | | | RBD | Human Patient | | FTSYAMNWVRQAPGQGLEWMGWINT | |
| | | | | | | | | | NTGNPTYAQGFTGRFVFSLDTSVSTAYL | |
| | | | | | | | | | QISSLKAEDTAVYYCARGRSYGLSLGYW | |
| | | | | | | | | | GQGTLVTVSS | |
| CoV2- | Ab | SARS-CoV2 | SARS- | | SARS-CoV1, | S; non- | B-cells; SARS-CoV2 | 509 | QVQLVESGGGVVQPGRSLRVSCAASGF | 1588 |
| 2611 | | | CoV1 | | SARS-CoV2 | RBD | Human Patient | | TFSSHGMHWVRQAPGKGLEWVSVIWY | |
| | | | | | | | | | DGSNKYYADSVKGRFTISRDNSKNTLSL | |
| | | | | | | | | | QMNSLRAEDTAVYYCARESADISSRLDY | |
| | | | | | | | | | WGRGTLVTVSS | |

| | | | | | | SEQ | | SEQ | | |
|---|---|---|---|---|---|---|---|---|---|---|
| | | Heavy V | Heavy J | Light V | Light J | ID | | ID | | |
| Name | VL | Gene | Gene | Gene | Gene | NO.: | CDRH3 | NO.: | CDRL3 | Sources |
| CoV2- | EIVMTQSPGTLSVSPGERATLSCRASQ | IGHV4-39 | IGHJ5 | IGKV3-15 | IGKJ2 | 2584 | ARDPRVVVTA | 3786 | QQYNNWP | Seth Zost et al., 2020 |
| 2570 | SVSSNLAWYQQKPGQAPRLLIYGAST | (Human) | (Human) | (Human) | (Human) | | RMYNWFDP | | PMYT | (https://www.nature.co |
| | RATGVPARFSGSGSGTEFTLTISSLQSE | | | | | | | | | m/articles/s41591-020- |
| | DFAVYYCQQYNNWPPMYTFGQGTKL | | | | | | | | | 0998-x) |
| | EIK | | | | | | | | | |
| CoV2- | EIVMTQSPATLSVSPGERATLSCRASQ | (Human) | IGHJ5 | IGKV3-15 | IGKJ1 | 2585 | ARDQRQFQL | 3787 | QQYNNWP | Seth Zost et al., 2020 |
| 2571 | SVSSNLAWYQQKPGQAPRLLIYGAST | IGHV4-59 | (Human) | (Human) | (Human) | | LGRFGWFDP | | RT | (https://www.nature.co |
| | RATGIPARFSGSGSGTEFTLTISSLQSE | | | | | | | | | m/articles/s41591-020- |
| | DFAVYYCQQYNNWPRTFGQGTKVEIK | | | | | | | | | 0998-x) |
| CoV2- | QPVVTQSPSASASLGASVKLTCTLDSG | IGHV4-39 | IGHJ2 | IGLV4-69 | IGLJ2 | 2586 | ARQWKWFG | 3788 | QTWGT | Seth Zost et al., 2020 |
| 2574 | HRSYAIAWHQQRPEKGPRFLMRITTD | (Human) | (Human) | (Human) | (Human) | | EAWYFDL | | | (https://www.nature.co |
| | GRHTKGDGIPDRFSGSGSGTERYLTISS | | | | | | | | | m/articles/s41591-020- |
| | LQSEDEADYYCQTWGTFGGGTRLTVL | | | | | | | | | 0998-x) |
| CoV2- | DIVMTQTPLSLSVTPGQPASISCKSSQS | IGHV7-4- | IGHJ6 | IGKV2D-29 | IGKJ4 | 2587 | ARDQDSGYP | 3789 | MQSIQPPL | Seth Zost et al., 2020 |
| 2582 | LLHSDGKTYLYWYLQKPGQSPQLLIYE | 1 | (Human) | (Human) | (Human) | | TYYYYYMDV | | T | (https://www.nature.co |
| | VSNRFSGVPDRFSGSGSGTDFTLKISR | (Human) | | | | | | | | m/articles/s41591-020- |
| | VEAEDVGVYYCMQSIQPPLTFGGGTK | | | | | | | | | 0998-x) |
| | VEIK | | | | | | | | | |
| CoV2- | DIVMTQSPDSLAVSLGERATINCKSSQ | IGHV1-8 | IGHJ6 | IGKV4-1 | IGKJ4 | 2588 | ARGGIYYLVR | 3790 | QQYYSTPL | Seth Zost et al., 2020 |
| 2583 | SVLYSSNNKNYLAWYQQKPGQPPKLLI | (Human) | (Human) | (Human) | (Human) | | GFIIGYYGMD | | T | (https://www.nature.co |
| | YWASTRESGVPDRFSGSGSGTDFTLTI | | | | | | V | | | m/articles/s41591-020- |
| | SSLQAEDVAVYYCQQYYSTPLTFGGGT | | | | | | | | | 0998-x) |
| | KVEIK | | | | | | | | | |
| CoV2- | QSALTQPASVSGSPGQLITIFCNGSISD | IGHV3-15 | IGHJ4 | IGLV2-14 | IGLJ2 | 2589 | TTGGYSSYAA | 3791 | SSFTSRGA | Seth Zost et al., 2020 |
| 2584 | VGGWNYVSWYQQHPDKAPKMMIY | (Human) | (Human) | (Human) | (Human) | | SDY | | LVL | (https://www.nature.co |
| | DVRHRPSGVSSRFSGSKSGNTASLTIS | | | | | | | | | m/articles/s41591-020- |
| | GLQAEDEGDYYCSSFTSRGALVLFGG | | | | | | | | | 0998-x) |
| | GTKLTVL | | | | | | | | | |
| CoV2- | QSALTQPRSVSGSPGQSVTISCTGTSS | IGHV3-48 | IGHJ2 | IGLV2-11 | IGLJ2 | 2590 | ARVDYYGSGS | 3792 | CSYAGIWV | Seth Zost et al., 2020 |
| 2585 | DVGGYNYVSWYQQHPGKAPKLMIYD | (Human) | (Human) | (Human) | (Human) | | VYWYFDL | | | (https://www.nature.co |
| | VSKRPSGVPDRFSGSKSGNTASLTISGL | | | | | | | | | m/articles/s41591-020- |
| | QAEDEADYYCCSYAGIWVFGGGTKLT | | | | | | | | | 0998-x) |
| | VL | | | | | | | | | |
| CoV2- | EIVLTQSPGTLSLSPGERATLSCRASQS | IGHV3-9 | IGHJ3 | IGKV3-20 | IGKJ2 | 2591 | AKVGWELSID | 3793 | QHYGSSRS | Seth Zost et al., 2020 |
| 2586 | VSSSYLGWYHQKPGQAPRLLIYGASSR | (Human) | (Human) | (Human) | (Human) | | AFDL | | T | (https://www.nature.co |
| | ATGIPDRFSGSGSGTDFTLTISRLEPED | | | | | | | | | m/articles/s41591-020- |
| | FAVYYCQHYGSSRSTFGQGTKLEIK | | | | | | | | | 0998-x) |
| CoV2- | DIQMTQSPSSLSASVGDRVTITCRARQ | IGHV2-5 | IGHJ3 | IGKV1-39 | IGKJ4 | 2592 | AHRLWFRDA | 3794 | QQSYSTPT | Seth Zost et al., 2020 |
| 2587 | SISNYLNWYQQKPGKAPKLLIYAASSL | (Human) | (Human) | (Human) | (Human) | | FDI | | | (https://www.nature.co |
| | HSGVPSRFSGSGSGTDFTLTISSLQPED | | | | | | | | | m/articles/s41591-020- |
| | FATYYCQQSYSTPTFGGGTKVEIK | | | | | | | | | 0998-x) |
| CoV2- | DIQMTQSPSSLSASVGDRVTITCRASQ | IGHV2-70 | IGHJ6 | IGKV1-39 | IGKJ2 | 2593 | ARIQYQLNG | 3795 | QQSYSTPY | Seth Zost et al., 2020 |
| 2589 | SISSYLNWYQQKPGKAPKLLIYAASSLH | (Human) | (Human) | (Human) | (Human) | | MDV | | T | (https://www.nature.co |
| | SGVPSRFSGSGSGTDFTLTISSLQPEDF | | | | | | | | | m/articles/s41591-020- |
| | ATYYCQQSYSTPYTFGQGTKLEIK | | | | | | | | | 0998-x) |
| CoV2- | SSELTQDPAVSVALGQTVRITCQGDSL | IGHV1-8 | IGHJ6 | IGLV3-19 | IGLJ2 | 2594 | ARGRVGYVG | 3796 | NSRDSSGN | Seth Zost et al., 2020 |
| 2590 | RSYYASWYQQKPRQAPVLIISGNNNR | (Human) | (Human) | (Human) | (Human) | | SGSRGYYYYY | | HLRV | (https://www.nature.co |
| | PSGIPDRFSGSSSGNTASLTITGAQAED | | | | | | DMDV | | | m/articles/s41591-020- |
| | EADYYCNSRDSSGNHLRVFGGGTKLT | | | | | | | | | 0998-x) |
| | VL | | | | | | | | | |
| CoV2- | EIVLTQSPGTLSLSPGERATLSCRASQS | IGHV5-51 | IGHJ2 | IGKV3-20 | IGKJ5 | 2595 | ARPDYSSGW | 3797 | QQYGRSPI | Seth Zost et al., 2020 |
| 2602 | VSSNFLAWYQQKPGQAPRLLIYGASS | (Human) | (Human) | (Human) | (Human) | | FSYWYFDL | | T | (https://www.nature.co |
| | RATGIPDRFSGSGSGTDFTLTISRLEPE | | | | | | | | | m/articles/s41591-020- |
| | DFAVYYCQQYGRSPITFGQGTRLEIK | | | | | | | | | 0998-x) |
| CoV2- | DIQMTQSPSSLSASVGDRVTITCQASQ | IGHV7-4- | IGHJ4 | IGKV1-33 | IGKJ3 | 2596 | ARGRSYGLSL | 3798 | QQYDNLL | Seth Zost et al., 2020 |
| 2610 | DISNYLNWYQQKPGKAPKLLIYAASNL | 1 | (Human) | (Human) | (Human) | | GY | | QFT | (https://www.nature.co |
| | ETGVPSRFSGSGSGTDFTFTISSLQPED | (Human) | | | | | | | | m/articles/s41591-020- |
| | IATYYCQQYDNLLQFTFGPGTKVDIK | | | | | | | | | 0998-x) |
| CoV2- | SYELTQPPSVSVSPGQTARITCSGDALP | IGHV3-33 | IGHJ4 | IGLV3-10 | IGLJ1 | 2597 | ARESADISS | 3799 | YSTDSSGN | Seth Zost et al., 2020 |
| 2611 | TKYAYWYQQKSGQAPVLVIYDDSKRP | (Human) | (Human) | (Human) | (Human) | | RLDY | | V | (https://www.nature.co |
| | SGIPERFSGSSSGTMATLTISGAQVED | | | | | | | | | m/articles/s41591-020- |
| | EADYYCYSTDSSGNVFGTGTKVTVL | | | | | | | | | 0998-x) |

| | | | | | Not | | | | | |
|---|---|---|---|---|---|---|---|---|---|---|
| | Ab | | | Neutral- | Neutral- | | | SEQ | | SEQ |
| | or | | Doesn't | ising | ising | Protein + | | ID | | ID |
| Name | Nb | Binds to | Bind to | Vs | Vs | Epitope | Origin | NO.: | VH or VHH | NO.: |
| CoV2- | Ab | SARS-CoV1, | | | SARS-CoV2 | S; non- | B-cells; SARS-CoV2 | 510 | QITFKESGPTLVKPTETLTLTCTFSGFSVS | 1589 |
| 2614 | | SARS-CoV2 | | | | RBD | Human Patient | | TSGEGVGWIRQPPGKALEWLAVIYWD | |
| | | | | | | | | | DDKRYSPSLKSRLTITRDTSKNQVVLTMT | |
| | | | | | | | | | NMDPVDTATYYCAHRLWFRDAFDIWG | |
| | | | | | | | | | QGTTVTVSS | |
| CoV2- | Ab | SARS-CoV1, | | | SARS-CoV2 | S; non- | B-cells; SARS-CoV2 | 511 | EVQLVESGGGLVQPGGSLRLSCAASGFI | 1590 |
| 2616 | | SARS-CoV2 | | | | RBD | Human Patient | | LSDHYMDWVRQAPGKGLEWVGRTRN | |
| | | | | | | | | | KANSYTTEYAASVKGRFTISRDDSKNSLY | |
| | | | | | | | | | LQMNSLKTEDTAVYYCASVITFGGVIVRS | |
| | | | | | | | | | YWGQGTLVTVSS | |
| CoV2- | Ab | SARS-CoV1, | | | SARS-CoV2 | S; non- | B-cells; SARS-CoV2 | 512 | QVQLVQSGAEVKKPGSSVKVSCKASGG | 1591 |
| 2617 | | SARS-CoV2 | | | | RBD | Human Patient | | TFSSYAISWVRQAPGQGLEWMGGIIPV | |
| | | | | | | | | | FGTTNYAQKLQGRVTISADESTSTAYME | |
| | | | | | | | | | VSSLRSEDTAVYYCARVSGYGDYGAYSD | |
| | | | | | | | | | YWGQGTLVTVSS | |
| CoV2- | Ab | SARS-CoV2 | SARS- | | SARS-CoV1, | S; RBD | B-cells; SARS-CoV2 | 513 | EVQLVESGGGLVQPGGSLRLSCVASEFT | 1592 |
| 2618 | | | CoV1 | | SARS-CoV2 | | Human Patient | | FSSYWMSWFRQAPGKGLEWVSGINW | |
| | | | | | | | | | NGGSTGYADSVKGRFTISRDNAKNSLYL | |
| | | | | | | | | | QMNSLKTEDTAVYYCASVITFGGVIVRSY | |
| | | | | | | | | | WGQGTLVTVSS | |
| CoV2- | Ab | SARS-CoV1, | | | SARS-CoV2 | S; non- | B-cells; SARS-CoV2 | 514 | EVQLLESGGGLVQPGGSLRLSCAASGFT | 1593 |
| 2619 | | SARS-CoV2 | | | | RBD | Human Patient | | FNNYAMSWVRQAPGKGLEWVSAIGGS | |
| | | | | | | | | | GGSTYYADSVKGRFTVSRDNSENTLYLQ | |
| | | | | | | | | | MSSLRAEDTAVYYCARVEGDWLLGGPY | |
| | | | | | | | | | YHYYGMDVWGQGTTVTVSS | |
| CoV2- | Ab | SARS-CoV1, | | | SARS-CoV2 | S; non- | B-cells; SARS-CoV2 | 515 | QVQLVESGGGVVQPGRSLRLSCAASGF | 1594 |
| 2620 | | SARS-CoV2 | | | | RBD | Human Patient | | TFSSYAMHWVRQAPGKGLEWVAGISY | |
| | | | | | | | | | DGSNKYYADSVKGRFTISRDNSKNTLYL | |
| | | | | | | | | | QMNSLRAEDTAVYYCARADTMVRGTYF | |
| | | | | | | | | | EYWGQGTLVTVSS | |
| CoV2- | Ab | SARS-CoV2 | SARS- | | SARS-CoV1, | S; non- | B-cells; SARS-CoV2 | 516 | QVQLVESGGGVVQPGRSLRLSCAASGF | 1595 |
| 2621 | | | CoV1 | | SARS-CoV2 | RBD | Human Patient | | TFSSYLMHWVRQAPGKGLEWVAVIWA | |
| | | | | | | | | | NGNRYYADSVKGRFTISRDISKNTLYLQ | |
| | | | | | | | | | MNSLRAEDTAMYYCARDYCNGVTCNS | |
| | | | | | | | | | NYWGQGTLVTVSS | |
| CoV2- | Ab | SARS-CoV2 | SARS- | | SARS-CoV1, | S; NTD | B-cells; SARS-CoV2 | 517 | QVQLQESGPGLVKPSGTLSLTCAVSGGS | 1596 |
| 2622 | | | CoV1 | | SARS-CoV2 | | Human Patient | | ISSSNWWSWVRQPPGKGLEWIGEIYHS | |
| | | | | | | | | | GSTNYNPSLKSRVTISVDKSKNQFSLKLSS | |
| | | | | | | | | | VTAADTAVYYCARGWYFDYWGQGTLV | |
| | | | | | | | | | TVSA | |
| CoV2- | Ab | SARS-CoV2 | SARS- | | SARS-CoV1, | S; non- | B-cells; SARS-CoV2 | 518 | QVQLVQSGAEVKKPGSSVKVSCKASGG | 1597 |
| 2624 | | | CoV1 | | SARS-CoV2 | RBD | Human Patient | | TFHNYAISWVRQAPGQGLEWMGGFIPI | |
| | | | | | | | | | LGTTNYAQKFQGRVTITADESTSTAYME | |
| | | | | | | | | | LSSLRSEDTAVYYCARVEGEGVDSYYYG | |
| | | | | | | | | | MDVWGQGTTVTVSS | |
| CoV2- | Ab | SARS-CoV2 | SARS- | SARS-CoV2 | | S; RBD | B-cells; SARS-CoV2 | 519 | EVQLVESGGGLVQPGRSLRLSCAASGFT | 1598 |
| 2628 | | | CoV1 | (weak) | | | Human Patient | | FDDYAMHWVRQAPGKGLEWVSGISW | |
| | | | | | | | | | NSGTIGYADSVKGRFIISRDNAKNSLYLQ | |
| | | | | | | | | | MNSLRPEDTALYYCAKDIIRQGEDGMD | |
| | | | | | | | | | VWGQGTTVTVSS | |
| CoV2- | Ab | SARS-CoV2 | SARS- | | SARS-CoV1, | S; RBD | B-cells; SARS-CoV2 | 520 | QLQVVQSGPGLVKPSETLSLTCTVSGDP | 1599 |
| 263 | | | CoV1 | | SARS-CoV2 | | Human Patient | | VINTNYYWGWIRQPPGKGLEWIGTLSY | |
| | | | | | | | | | SGGTHYNPSLSSRVTIAVDSSKKRFSLTLR | |
| | | | | | | | | | SVTAADTAIYYCARHPVDGYNYGYSDL | |
| | | | | | | | | | WGQGTLVTVSS | |
| CoV2- | Ab | SARS-CoV2 | SARS- | | SARS-CoV1, | S; RBD | B-cells; SARS-CoV2 | 521 | QVQLVQSGAEVKKPGASVKVSCKASGY | 1600 |
| 2632 | | | Cov1 | | SARS-CoV2 | | Human Patient | | TFTDYYMHWVRQAPGQGLEWMGWI | |
| | | | | | | | | | NPNSRGTNYAQKFQGRVTMTRDTSIST | |
| | | | | | | | | | VYMELSRLTSDDTAVYYCARVVVLGYGR | |
| | | | | | | | | | PNNYYDGRNVWDYWGQGTLVTVSS | |
| CoV2- | Ab | SARS-CoV1, | | | SARS-CoV2 | S; non- | B-cells; SARS-CoV2 | 522 | QVQLVESGGGVVQPGRSLRLSCAASGF | 1601 |
| 2639 | | SARS-CoV2 | | | | RBD | Human Patient | | TFSSYAMHWVRQAPGKGLEWVAVISY | |
| | | | | | | | | | DEINKYYADSVKGRFTISRDNSKTTLDLQ | |
| | | | | | | | | | MNSLRAEDTAVYYCARAGGGSYRGPFD | |
| | | | | | | | | | YWGQGTLVTVSS | |
| CoV2- | Ab | SARS-CoV1, | | | SARS-CoV2 | S; non- | B-cells; SARS-CoV2 | 523 | QVQLVESGGGVVQPGRSLRLSCAASGF | 1602 |
| 2641 | | SARS-CoV2 | | | | RBD | Human Patient | | TFSTYAMHWVRQAPGKGLEWVTVISYD | |
| | | | | | | | | | GSNKYYADSVKGRFTISRDNSKNTLYLQ | |
| | | | | | | | | | MNSLRAEDTAVYYCAKSYNGNYYDAFDI | |
| | | | | | | | | | WGQGTMVTVSS | |

| | | | | | | SEQ | | SEQ | | |
|---|---|---|---|---|---|---|---|---|---|---|
| | | Heavy V | Heavy J | Light V | Light J | ID | | ID | | |
| Name | VL | Gene | Gene | Gene | Gene | NO.: | CDRH3 | NO.: | CDRL3 | Sources |
| CoV2- | EIVMTQSPATLSVSAGERATLSCRASQ | IGHV2-5 | IGHJ3 | IGKV3-15 | IGKJ4 | 2598 | AHRLWFRDA | 3800 | QQYNSYSL | Seth Zost et al., 2020 |
| 2614 | SISSNLAWYHQKPGQAPRLLIYGASTR | (Human) | (Human) | (Human) | (Human) | | FDI | | T | (https://www.nature.co |
| | ATGIPARFSGSGSGTEFTLTISSLQSEDF | | | | | | | | | m/articles/s41591-020- |
| | AVYYCQQYNSYSLTFGGGTKVEIK | | | | | | | | | 0998-x) |
| CoV2- | EIVLTQSPGTLSLSPGERATLSCRASQS | IGHV3-72 | IGHJ4 | IGKV3-20 | IGKJ3 | 2599 | ASVITFGGVIV | 3801 | QYYGSSPF | Seth Zost et al., 2020 |
| 2616 | VSSSYLAWYQQKPGQAPRLLIYGASSR | (Human) | (Human) | (Human) | (Human) | | RSY | | G | (https://www.nature.co |
| | ATGIPDRFSGSGSGTDFTLTISRLEPED | | | | | | | | | m/articles/s41591-020- |
| | FAVYYCQYYGSSPFGFGPGTKVDIK | | | | | | | | | 0998-x) |
| CoV2- | EIVLTQSPATLSLSPGERATLSCRASQS | IGHV1-69 | IGHJ4 | IGKV3-11 | IGKJ4 | 2600 | ARVSGYGDY | 3802 | QQRSNWP | Seth Zost et al., 2020 |
| 2617 | VSRFLAWYQQKPGQAPRLLIYDASNR | (Human) | (Human) | (Human) | (Human) | | GAYSDY | | PRLT | (https://www.nature.co |
| | ATGIPARFSGSGSGTDFTLTISSLEPEDF | | | | | | | | | m/articles/s41591-020- |
| | AVYYCQQRSNWPPRLTFGGGTKVEIK | | | | | | | | | 0998-x) |
| CoV2- | QSVLTQPPSASGTPGQRVTISCSGSSS | IGHV3-20 | IGHJ4 | IGLV1-44 | IGLJ2 | 2601 | ASVITFGGVIV | 3803 | AVWDDSL | Seth Zost et al., 2020 |
| 2618 | NIGSNTVNWYQQLPGTAPKLLIYSNN | (Human) | (Human) | (Human) | (Human) | | RSY | | NGVV | (https://www.nature.co |
| | QRPSGVPDRFSGSKSGTSASLAISGLQ | | | | | | | | | m/articles/s41591-020- |
| | SEDENNYYCAVWDDSLNGVVFGGGT | | | | | | | | | 0998-x) |
| | KLTVL | | | | | | | | | |
| CoV2- | QSVLTQPPSASGTPGQRVTISCSGSSS | IGHV3-23 | IGHJ6 | IGLV1-47 | IGLJ2 | 2602 | ARVEGDWLL | 3804 | LVWDDSL | Seth Zost et al., 2020 |
| 2619 | NIGSNYVYWYQQLPGTAPKLLISRNN | (Human) | (Human) | (Human) | (Human) | | GGPYYHYYG | | NGLV | (https://www.nature.co |
| | QRPSGVPDRFSGSKSGTSASLAISGLQ | | | | | | MDV | | | m/articles/s41591-020- |
| | SEDEANYYCLVWDDSLNGLVFGGGTK | | | | | | | | | 0998-x) |
| | LTVL | | | | | | | | | |
| CoV2- | QSALTQPASVSGSPGQSITISCTGTSSD | IGHV3-30- | IGHJ4 | IGLV2-14 | IGLJ2 | 2603 | ARADTMVRG | 3805 | SSYTSSRAV | Seth Zost et al., 2020 |
| 2620 | VGGYNYVSWYQQHPGKAPKLMIYDV | 3 | (Human) | (Human) | (Human) | | TYFEY | | L | (https://www.nature.co |
| | SNRPSGVSNRFSGSKSGNTASLTISGL | (Human) | | | | | | | | m/articles/s41591-020- |
| | QAEDEADYCCSSYTSSRAVLFGGGTKL | | | | | | | | | 0998-x) |
| | TVL | | | | | | | | | |
| CoV2- | DFVMTQSPGSLAVSLGERATINCRSSQ | IGHV3-33 | IGHJ4 | IGKV4-1 | IGKJ1 | 2604 | ARDYCNGVT | 3806 | QQYYSSH | Seth Zost et al., 2020 |
| 2621 | SVLDNSSNKNHLAWHQQKPGQPPKL | (Human) | (Human) | (Human) | (Human) | | CNSNY | | WT | (https://www.nature.co |
| | LIYWASTRESGVPDRFSGSGSGTDFTL | | | | | | | | | m/articles/s41591-020- |
| | TISSLQAEDVAVYYCQQYYSSHWTFG | | | | | | | | | 0998-x) |
| | QGTKVEIK | | | | | | | | | |
| CoV2- | QSALTQPASVSGSPGQSITISCTGTSSD | IGHV4-4 | IGHJ4 | IGLV2-23 | IGLJ3 | 2605 | ARGWYFDY | 3807 | YSYAGSST | Seth Zost et al., 2020 |
| 2622 | VGSYNLVSWYQQHPGKAPKLMIYEVS | (Human) | (Human) | (Human) | (Human) | | | | WV | (https://www.nature.co |
| | KRPSGVSNRFSGSKSGNTASLTISGLQ | | | | | | | | | m/articles/s41591-020- |
| | AEDEADYYCYSYAGSSTWVFGGGTKL | | | | | | | | | 0998-x) |
| | TVL | | | | | | | | | |
| CoV2- | SYELTQPPSVSVSPGQTARITCSADALP | IGHV1-69 | IGHJ6 | IGLV3-25 | IGLJ2 | 2606 | ARVEGEGVD | 3808 | QSTDSSGS | Seth Zost et al., 2020 |
| 2624 | KQYAYWYQQKPGQAPVLVIYKDSERP | (Human) | (Human) | (Human) | (Human) | | SYYYGMDV | | YVV | (https://www.nature.co |
| | SGIPERFSGSSSGTTVTLTISGVQAEDE | | | | | | | | | m/articles/s41591-020- |
| | ADYYCQSTDSSGSYVVFGGGTKLTVL | | | | | | | | | 0998-x) |
| CoV2- | DIQMTQSPSSLSASVGDRVTITCRASQ | IGHV3-9 | IGHJ6 | IGKV1-39 | IGKJ2 | 2607 | AKDIIRQGED | 3809 | HQSYFTPQ | Seth Zost et al., 2020 |
| 2628 | NIASYLNWYQQKPGKAPKLLIYAASSL | (Human) | (Human) | (Human) | (Human) | | GMDV | | T | (https://www.nature.co |
| | QSGVPSRFSGSGSGTDFTLTISSLQPEE | | | | | | | | | m/articles/s41591-020- |
| | FATYYCHQSYFTPQTFGQGTKLEIK | | | | | | | | | 0998-x) |
| CoV2- | EIVLTQSPATLALSVGERATLSCVASQR | IGHV4-39 | IGHJ5 | IGKV3D-20 | IGKJ3 | 2608 | ARHPVDGYN | 3810 | QQYGNSP | Seth Zost et al., 2020 |
| 263 | VSSDYIAWYQKKPGLAPRLLVYHGSA | (Human) | (Human) | (Human) | (Human) | | YGYSDL | | FT | (https://www.nature.co |
| | WATGSSARFSGSGSGTAFTLTISSLEPE | | | | | | | | | m/articles/s41591-020- |
| | DFAVYYCQQYGNSPFTFGPGTKVEFK | | | | | | | | | 0998-x) |
| CoV2- | EIVLTQSPGTLSLSPGERATLSCRASQS | IGHV1-2 | IGHJ4 | IGKV3-20 | IGKJ2 | 2609 | ARVVVLGYGR | 3811 | QQYVEPPF | Seth Zost et al., 2020 |
| 2632 | VSSSYLAWYQEKPGQAPRLLMYSASS | (Human) | (Human) | (Human) | (Human) | | PNNYYDGRN | | T | (https://www.nature.co |
| | RATGIPDRFSGSGSATDFTLTINRLEPE | | | | | | VWDY | | | m/articles/s41591-020- |
| | DFAVYYCQQYVEPPFTFGQGTKLEIK | | | | | | | | | 0998-x) |
| CoV2- | QSALTQPRSVSGSPGQSVTISCTGTSS | IGHV3-30 | IGHJ4 | IGLV2-11 | IGLJ2 | 2610 | ARAGGGSYR | 3812 | SAYAGSNN | Seth Zost et al., 2020 |
| 2639 | DVGGYNYVSWYQQHPGKAPKLMIYD | (Human) | (Human) | (Human) | (Human) | | GPFDY | | LV | (https://www.nature.co |
| | VSKRPSGVPDRFSGSKSGNTASLTVSG | | | | | | | | | m/articles/s41591-020- |
| | LQAEDEAEYYCSAYAGSNNLVFGGGT | | | | | | | | | 0998-x) |
| | KLTVL | | | | | | | | | |
| CoV2- | EIVLTQSPGTLSLSPGERATLSCRAGQT | IGHV3-30 | IGHJ3 | IGKV3-20 | IGKJ2 | 2611 | AKSYNGNYYD | 3813 | QQYGSSYT | Seth Zost et al., 2020 |
| 2641 | VSSSYLAWYQHKPGQAPRLLIYGASSR | (Human) | (Human) | (Human) | | | | | | (https://www.nature.co |
| | ATGIPDRFSGSGSGTDFTLTISRLEPED | | | | | | | | | m/articles/s41591-020- |
| | FAVYYCQQYGSSYTFGQGTKLEIK | | | | | | | | | 0998-x) |

| | | | | | Not | | | | | |
|---|---|---|---|---|---|---|---|---|---|---|
| | Ab | | | Neutral- | Neutral- | | | SEQ | | SEQ |
| | or | | Doesn't | ising | ising | Protein + | | ID | | ID |
| Name | Nb | Binds to | Bind to | Vs | Vs | Epitope | Origin | NO.: | VH or VHH | NO.: |
| CoV2- | Ab | SARS-CoV2 | SARS- | | SARS-CoV1, | S; non- | B-cells; SARS-CoV2 | 524 | QVQLVESGGGVVQPGRSLRLSCAASGF | 1603 |
| 2643 | | | CoV1 | | SARS-CoV2 | RBD | Human Patient | | TFSSYGMHWVRQAPGKGLEWVAVISY | |
| | | | | | | | | | DGSNKYYADSVKGRFTISRDNAKNSLYL | |
| | | | | | | | | | QMNSLRAEDTAVYYCARGSAGNYYYG | |
| | | | | | | | | | MDVWGQGTTVTVSS | |
| CoV2- | Ab | SARS-CoV2 | SARS- | | SARS-CoV1, | S; non- | B-cells; SARS-CoV2 | 525 | EVQLVQSGAEVKKPGESLKISCKGSGYSF | 1604 |
| 2656 | | | CoV1 | | SARS-CoV2 | RBD | Human Patient | | SDYWIGWVRQMPGKGLEWMGIIYPG | |
| | | | | | | | | | DSDTRYSPSFQGQVTISADKSISTAYLQW | |
| | | | | | | | | | SSLKASDTAMYYCARLTFGGSGSYYFYYN | |
| | | | | | | | | | GMDVWGQGTTVTVSS | |
| CoV2- | Ab | SARS-CoV2 | SARS- | | SARS-CoV1, | S; non- | B-cells; SARS-CoV2 | 526 | EVQLVESGGGLVQPGGSLRLSCAASGFT | 1605 |
| 2660 | | | CoV1 | | SARS-CoV2 | RBD | Human Patient | | FSSYDMHWVRQATGKGLEWVSAIGTA | |
| | | | | | | | | | GDTYYPGSVKGRFTISRENAKNSLYLQM | |
| | | | | | | | | | NSLRAGDTAVYYCARADPYQLLGQHYYY | |
| | | | | | | | | | GMDVWGQGTTVTVSS | |
| CoV2- | Ab | SARS-CoV1, | | | SARS-CoV2 | S; non- | B-cells; SARS-CoV2 | 527 | QVHLVESGGGVVQPGRSLRLSCAASGF | 1606 |
| 2669 | | SARS-CoV2 | | | | RBD | Human Patient | | TFSNYGMHWVRQAPGKGLEWVAVISN | |
| | | | | | | | | | DEFNKFYANSVKGRFTISRDNSKNTVYL | |
| | | | | | | | | | QLNSLRTEDTARYYCAKGGDGSGWAW | |
| | | | | | | | | | DGDNPPTDYWGQGTLVIVSS | |
| CoV2- | Ab | SARS-CoV2 | SARS- | | SARS-CoV1, | S; NTD | B-cells; SARS-CoV2 | 528 | QVTLKESGPVLVKPTETLTLTCAVSGFSLS | 1607 |
| 2673 | | | CoV1 | | SARS-CoV2 | | Human Patient | | NAKMGVSWIRQPPGKALEWLAHIFSN | |
| | | | | | | | | | DEKAYSTSLKTRLTISKDTSKSQVVLTVTN | |
| | | | | | | | | | MDPVDTATYYCARIVLGASGTYPSPGFD | |
| | | | | | | | | | PWGQGTLVTVSS | |
| CoV2- | Ab | SARS-CoV2 | SARS- | | SARS-CoV1, | S; non- | B-cells; SARS-CoV2 | 529 | QVQLVESGGGVVQPGRSLRLSCAASGF | 1608 |
| 2675 | | | CoV1 | | SARS-CoV2 | RBD | Human Patient | | TFSIYGMHWVRQAPGKGLEWVAVISFD | |
| | | | | | | | | | GSNKYYADSVKGRFTISRDNSKNTLYLQ | |
| | | | | | | | | | MNSLRAEDTAVYYCAKDGSGSYYGWFD | |
| | | | | | | | | | PWGQGTLVTVSS | |
| CoV2- | Ab | SARS-CoV2 | SARS- | SARS-CoV2 | | S; non- | B-cells; SARS-CoV2 | 530 | QVQLVQSGAEVKKPGSSVKVSCKASGG | 1609 |
| 2676 | | | CoV1 | (weak) | | RBD | Human Patient | | TFSSYAINWVRQAPGQGLEWMGGIIPIF | |
| | | | | | | | | | GTANYAQKFQGRVTFTADESTSTAYME | |
| | | | | | | | | | VSSLRSEDTAVYYCARSCGDCYSADLDF | |
| | | | | | | | | | WGQGTLVTVSS | |
| CoV2- | Ab | SARS-CoV1, | | SARS-CoV2 | | S; RBD | B-cells; SARS-CoV2 | 531 | QLQLQESGPGLVKPSETLSLTCTVSGGSI | 1610 |
| 2677 | | SARS-CoV2 | | | | | Human Patient | | SSSSYYWGWIRQPPGKGLEWIGSMYYS | |
| | | | | | | | | | GSTYYNPSLKSRVTISVDTSKNQFSLKLSS | |
| | | | | | | | | | VTAADTAVYYCARLLWLRGHFDYWGQ | |
| | | | | | | | | | GTLVTVSS | |
| CoV2- | Ab | SARS-CoV1, | | SARS-CoV2 | | S; RBD | B-cells; SARS-CoV2 | 532 | EVQLVESGGGVVRPGGSLRLSCAASGFI | 1611 |
| 2678 | | SARS-CoV2 | | | | | Human Patient | | FDDYDMTWVRQAPGKGLEWVSGISW | |
| | | | | | | | | | NGGNTGYADSVKGRFTISRDNAKNSLYL | |
| | | | | | | | | | QMNSLRAEDTALYHCAVIMSPIPRYSGY | |
| | | | | | | | | | DWAGGAFDIWGQGTMVTVSS | |
| CoV2- | Ab | SARS-CoV1, | | | SARS-CoV2 | S; non- | B-cells; SARS-CoV2 | 533 | QVQLVESGGGVVQPGRSLRLSCAASGF | 1612 |
| 2681 | | SARS-CoV2 | | | | RBD | Human Patient | | TFSFYAIHWVRQAPGQGLEWAAAISSD | |
| | | | | | | | | | GTYKYYADSVKGRFTISRDNSKNTSYLQ | |
| | | | | | | | | | MNSLRAEDTAVYYCARALNKGFDPWG | |
| | | | | | | | | | QGTLLTVSS | |
| CoV2- | Ab | SARS-CoV2 | SARS- | SARS-CoV2 | | S; RBD | B-cells; SARS-CoV2 | 534 | QMQLVQSGPEVKKPGTSVKVSCKTSGF | 1613 |
| 2684 | | | CoV1 | (weak) | | | Human Patient | | TFTSSAIQWVRQARGQRLEWIGWIVVG | |
| | | | | | | | | | SGNTNYAQKFQERVTITRDMSTSTAYM | |
| | | | | | | | | | ELSSLRSEDTAVYYCAAPHCNRTSCYDAF | |
| | | | | | | | | | DLWGQGTMVTVSS | |
| CoV2- | Ab | SARS-CoV1, | | | SARS-CoV2 | S; non- | B-cells; SARS-CoV2 | 535 | QVQLVQSGAEVKKPGASVQVSCEASGY | 1614 |
| 2685 | | SARS-CoV2 | | | | RBD | Human Patient | | TFTTYYMHWVRQAPGQGLEWMGIINP | |
| | | | | | | | | | SGGSTTYAQKFQGRVTMTRDTSTSTVY | |
| | | | | | | | | | MDLSSLRSEDTAVYYCARDRLGDGSYLG | |
| | | | | | | | | | GGYYGMDVWGQGTTVTVSS | |
| CoV2- | Ab | SARS-CoV2 | SARS- | SARS-CoV2 | | S; RBD | B-cells; SARS-CoV2 | 536 | QVQLVQSGAEVKKPGASVKVSCQASGY | 1615 |
| 2693 | | | CoV1 | (weak) | | | Human Patient | | TFTSYDINWVRQATGQGLEWMGWMK | |
| | | | | | | | | | SNSGNTGYAQKFQGRVTMTRNTSISTA | |
| | | | | | | | | | YMELTSLRSEDTAVYYCARMRSGWPTH | |
| | | | | | | | | | GRPDDLWGRGTLVTVSS | |
| CoV2- | Ab | SARS-CoV2 | SARS- | | SARS-CoV1, | S; RBD | B-cells; SARS-CoV2 | 537 | QVQLVQSGAEVKRPGSSVKVSCKASGG | 1616 |
| 2694 | | | CoV1 | | SARS-CoV2 | | Human Patient | | TFSSYTISWVRQAPGQGLEWMGRIIPIL | |
| | | | | | | | | | AVANYAQKFQGRVTITADKSTSTAYMEL | |
| | | | | | | | | | SSLRSEDTAVYYCARDHSGYYDSTSLMSP | |
| | | | | | | | | | FFDYWGQGTLVTVSS | |

| | | | | | | SEQ | | SEQ | | |
|---|---|---|---|---|---|---|---|---|---|---|
| | | Heavy V | Heavy J | Light V | Light J | ID | | ID | | |
| Name | VL | Gene | Gene | Gene | Gene | NO.: | CDRH3 | NO.: | CDRL3 | Sources |
| CoV2- | DIQMTQSPSSLSASVGDRVTITCRASQ | IGHV3-30 | IGHJ6 | IGKV1-39 | IGKJ5 | 2612 | ARGSAGNYYY | 3814 | QQSYSTPG | Seth Zost et al., 2020 |
| 2643 | SISSYLNWYQQKPGKAPKLLIYAASSLQ | (Human) | (Human) | (Human) | (Human) | | GMDV | | T | (https://www.nature.co |
| | SGVPSRFSGSGSGTDFTLTISSLQPEDY | | | | | | | | | m/articles/s41591-020- |
| | ATYYCQQSYSTPGTFGQGTRLEIK | | | | | | | | | 0998-x) |
| CoV2- | EIVLTQSPGTLSLSPGERATLSCRASQS | IGHV5-51 | IGHJ6 | IGKV3-20 | IGKJ1 | 2613 | ARLTFGGSGS | 3815 | QQYGRSS | Seth Zost et al., 2020 |
| 2656 | VSSSYLAWYQQKPGQAPRLLIYGASSR | (Human) | (Human) | (Human) | (Human) | | YYFYYNGMD | | GT | (https://www.nature.co |
| | ATGIPDRFSGSGSGTDFTLTISRLEPED | | | | | | V | | | m/articles/s41591-020- |
| | FAVYYCQQYGRSSGTFGQGTKVEIK | | | | | | | | | 0998-x) |
| CoV2- | EIVLTQSPGTLSLSPGERATLSCRASQS | IGHV3-13 | IGHJ6 | IGKV3-20 | IGKJ5 | 2614 | ARADPYQLLG | 3816 | QQYGSSPL | Seth Zost et al., 2020 |
| 2660 | VSSSYLAWYQQKPGQAPRLLIYGASSR | (Human) | (Human) | (Human) | (Human) | | QHYYYGMDV | | IT | (https://www.nature.co |
| | ATGIPDRFSGSGSGTDFTLTISRLEPED | | | | | | | | | m/articles/s41591-020- |
| | FAVYYCQQYGSSPLITFGQGTRLEIK | | | | | | | | | 0998-x) |
| CoV2- | DIVMTQSPDFLAVSLGERATISCKSSQS | IGHV3-30 | IGHJ4 | IGKV4-1 | IGKJ4 | 2615 | AKGGDGSG | 3817 | QQYYTAPL | Seth Zost et al., 2020 |
| 2669 | VLYTPKNKNYLAWYKQKPGQPPKVLIY | (Human) | (Human) | (Human) | (Human) | | WAWDGDNP | | T | (https://www.nature.co |
| | WASTRESGVPDRFSGSGSGTDFTLIISS | | | | | | PTDY | | | m/articles/s41591-020- |
| | LQAEDAAVYYCQQYYTAPLTFGGGTR | | | | | | | | | 0998-x) |
| | VEIK | | | | | | | | | |
| CoV2- | QTVVTQEPSLTVSPGGTVTLTCASSAG | IGHV2-26 | IGHJ5 | IGLV7-43 | IGLJ3 | 2616 | ARIVLGASGT | 3818 | LLYYGGA | Seth Zost et al., 2020 |
| 2673 | AVTSGYYPNWFQQKPGQAPRALIYST | (Human) | (Human) | (Human) | (Human) | | YPSPGFDP | | WV | (https://www.nature.co |
| | ANKHSWTPARFSGSLLGGKAALTLSG | | | | | | | | | m/articles/s41591-020- |
| | VQPEDEAEYYCLLYYGGAWVFGGGTK | | | | | | | | | 0998-x) |
| | LTVL | | | | | | | | | |
| CoV2- | EIVLTQSPDFQSVTPKEKVTITCRASQN | IGHV3-30 | IGHJ5 | IGKV6-21 | IGKJ4 | 2617 | AKDGSGSYYG | 3819 | HQSSSLPP | Seth Zost et al., 2020 |
| 2675 | IGSSLHWYQQKPDQSPKVIIKYASQSF | (Human) | (Human) | (Human) | (Human) | | WFDP | | T | (https://www.nature.co |
| | SGVPSRFSGSGSGTDFTLTINSLEAEDA | | | | | | | | | m/articles/s41591-020- |
| | ATYYCHQSSSLPPTFGGGTKVEIK | | | | | | | | | 0998-x) |
| CoV2- | EIVLTQSPATLSLSPGERATLSCRASQSI | IGHV1-69 | IGHJ4 | IGKV3-11 | IGKJ3 | 2618 | ARSCGDCYSA | 3820 | QRRSNWP | Seth Zost et al., 2020 |
| 2676 | SSFLAWYQQKPGQAPRLLIYDASNRA | (Human) | (Human) | (Human) | (Human) | | DLDE | | PFT | (https://www.nature.co |
| | TGIPARFSGSGSGTDFTLTISSLEPEDFA | | | | | | | | | m/articles/s41591-020- |
| | VYYCQRRSNWPPFTFGPGTKVDIK | | | | | | | | | 0998-x) |
| CoV2- | NFMLTQPHSVSESPGKTVTISCTGSSG | IGHV4-39 | IGHJ4 | IGLV6-57 | IGLJ3 | 2619 | ARLLWLRGHF | 3821 | QSYDSSNY | Seth Zost et al., 2020 |
| 2677 | SIASNYVQWYQQRPGSAPTTVIYEDN | (Human) | (Human) | (Human) | (Human) | | DY | | WV | (https://www.nature.co |
| | QRPSGVPDRFSGSIDSSSNSASLTISGL | | | | | | | | | m/articles/s41591-020- |
| | KTEDEADYYCQSYDSSNYWVFGGGTK | | | | | | | | | 0998-x) |
| | LTVL | | | | | | | | | |
| CoV2- | SSELTQDPAVSVALGQTVRITCQGDSL | IGHV3-20 | IGHJ3 | IGLV3-19 | IGLJ3 | 2620 | AVIMSPIPRY | 3822 | NSRDSSGN | Seth Zost et al., 2020 |
| 2678 | RSYYASWYQQKPGQVPILVIYDKNNR | (Human) | (Human) | (Human) | (Human) | | SGYDWAGGAF | | AVV | (https://www.nature.co |
| | PSGIPDRFSGSSSGNTASLTITGAQAED | | | | | | DI | | | m/articles/s41591-020- |
| | EADYYCNSRDSSGNAVVFGGGTKLTV | | | | | | | | | 0998-x) |
| | L | | | | | | | | | |
| CoV2- | DIVMTQSPDSLAVSLGERATINCKSSQ | IGHV3-30 | IGHJ5 | IGKV4-1 | IGKJ2 | 2621 | ARALNKGFDP | 3823 | QQYYSSPY | Seth Zost et al., 2020 |
| 2681 | SVLYSSNNKNYLAWYQQKPGQPPKLLI | (Human) | (Human) | (Human) | (Human) | | | | T | (https://www.nature.co |
| | YWASTRESGVPDRFSGSGSGTDFTLTI | | | | | | | | | m/articles/s41591-020- |
| | SSLQAEDVAVYYCQQYYSSPYTFGQGT | | | | | | | | | 0998-x) |
| | KLEIK | | | | | | | | | |
| CoV2- | EIVLTQSPGTLSLSPGERATLSCRASQS | IGHV1-58 | IGHJ3 | IGKV3-20 | IGKJ1 | 2622 | AAPHCNRTSC | 3824 | QQYNNW | Seth Zost et al., 2020 |
| 2684 | VSSSYLGWYQQKPGQAPRLLIYGASSR | (Human) | (Human) | (Human) | (Human) | | YDAFDL | | WRT | (https://www.nature.co |
| | ATGIPDRFSGSGSGTDFTLTISRLESED | | | | | | | | | m/articles/s41591-020- |
| | FALYYCQQYNNWWRTFGQGTKVEIK | | | | | | | | | 0998-x) |
| CoV2- | EIVLTQSPGTLSLSPGERATLSCRASQS | IGHV1-46 | IGHJ6 | IGKV3-20 | IGKJ4 | 2623 | ARDRLGDGSY | 3825 | QQYGSSPR | Seth Zost et al., 2020 |
| 2685 | VSSSYLAWYQQKRGQAPRLLIYGASSR | (Human) | (Human) | (Human) | (Human) | | LGGGYYGMD | | LT | (https://www.nature.co |
| | ATGIPDRFSGSGSGTDFTLTISRLEPED | | | | | | V | | | m/articles/s41591-020- |
| | FAVYYCQQYGSSPRLTFGGGTKVEIK | | | | | | | | | 0998-x) |
| CoV2- | QSVLTQPPSASGTPGQRVTISCSGSNS | IGHV1-8 | IGHJ5 | IGLV1-44 | IGLJ2 | 2624 | ARMRSGWPT | 3826 | AVWDDSL | Seth Zost et al., 2020 |
| 2693 | NIGSYTVNWYQQLPGTAPKLLIYDNN | (Human) | (Human) | (Human) | (Human) | | HGRPDDL | | NGLV | (https://www.nature.co |
| | QRTSGVPDRLSGSKSGTSASLAISGLQS | | | | | | | | | m/articles/s41591-020- |
| | EDEANYYCAVWDDSLNGLVFGGGTK | | | | | | | | | 0998-x) |
| | LTVL | | | | | | | | | |
| CoV2- | QSVLTQPPSVSGAPGQRVTISCTGSSS | IGHV1-69 | IGHJ4 | IGLV1-40 | IGLJ3 | 2625 | ARDHSGYYDS | 3827 | QSYDSSLN | Seth Zost et al., 2020 |
| 2694 | NIGAGYDVHWYQQLPGTAPKLLIFGN | (Human) | (Human) | (Human) | (Human) | | TSLMSPFFDY | | GDV | (https://www.nature.co |
| | TNRPSGVPDRFSGSKSGTSTSLAITGLQ | | | | | | | | | m/articles/s41591-020- |
| | AEDEADYYCQSYDSSLNGDVFGGGTK | | | | | | | | | 0998-x) |
| | LTVL | | | | | | | | | |

| | | | | | Not | | | | | |
|---|---|---|---|---|---|---|---|---|---|---|
| | Ab | | | Neutral- | Neutral- | | | SEQ | | SEQ |
| | or | | Doesn't | ising | ising | Protein + | | ID | | ID |
| Name | Nb | Binds to | Bind to | Vs | Vs | Epitope | Origin | NO.: | VH or VHH | NO.: |
| CoV2- | Ab | SARS-CoV2 | SARS- | | SARS-CoV1, | S; non- | B-cells; SARS-CoV2 | 538 | QVQLVQSGAEVKKPGASVKVSCKASGY | 1617 |
| 2697 | | | CoV1 | | SARS-CoV2 | RBD | Human Patient | | TFTSHYMHWVRQAPGQGLEWMGIINP | |
| | | | | | | | | | SGGSTSYAQKFQGRVTMTGDTSTSTVY | |
| | | | | | | | | | MELSSLRSEDTAVYYCARDLAGVPAALG | |
| | | | | | | | | | CWFDPWGQGTLVTVSS | |
| CoV2- | Ab | SARS-CoV2 | SARS- | | SARS-CoV1, | S; non- | B-cells; SARS-CoV2 | 539 | QVQLVESGGGVVQPGRSLRLSCAASGF | 1618 |
| 2700 | | | CoV1 | | SARS-CoV2 | RBD | Human Patient | | TFSTYAMHWVRQAPGKGLEWVAVISY | |
| | | | | | | | | | DGGNKYYADSVKGRFTISRDNSKNTLYL | |
| | | | | | | | | | QMNSLRAEDTAVYYCAKNLGPYCSGGT | |
| | | | | | | | | | CYSLVGDYWGQGTLVTVSS | |
| CoV2- | Ab | SARS-CoV2 | SARS- | | SARS-CoV1, | S; RBD | B-cells; SARS-CoV2 | 540 | EVQLVESGGGLVQPGGSLRLSCAASGFT | 1619 |
| 2703 | | | CoV1 | | SARS-CoV2 | | Human Patient | | FSSYDMHWVRQATGKGLEWVSAIGTA | |
| | | | | | | | | | GDTYYPGSVKGRFTISRENAKNSLYLQM | |
| | | | | | | | | | NSLRAGDTAVYYCARARGGYNWNFDY | |
| | | | | | | | | | WGQGTLVTVSS | |
| CoV2- | Ab | SARS-CoV1, | | | SARS-CoV2 | S; RBD | B-cells; SARS-CoV2 | 541 | QVQLVESGGGVVQPGRSLRLSCAASGF | 1620 |
| 2705 | | SARS-CoV2 | | | | | Human Patient | | TFSSYAMHWVRQAPGKGLEWVAVISY | |
| | | | | | | | | | DGSYKYFADSVKGRFTISRDNSKNTLYLQ | |
| | | | | | | | | | MNSLRAEDTAVYYCARDQGTVVTHFDY | |
| | | | | | | | | | WGQGTLVTVSS | |
| CoV2- | Ab | SARS-CoV1, | | | SARS-CoV2 | S; RBD | B-cells; SARS-CoV2 | 542 | QVQLVESGGGVVQPGRSLRLSCAASGF | 1621 |
| 2709 | | SARS-CoV2 | | | | | Human Patient | | TFSNYGMHWVRQAPGKGLEWVAVMS | |
| | | | | | | | | | YDGSNKYYADSVKGRFTISRDNSKNTLYL | |
| | | | | | | | | | QMNSLRAEDTAVYYCAKNLGPYCSGGT | |
| | | | | | | | | | CYSLVGDYWGQGTLVTVSS | |
| CoV2- | Ab | SARS-CoV2 | SARS- | | SARS-CoV1, | S; RBD | B-cells; SARS-CoV2 | 543 | QVQLVQSGAEVKKPGASVKVSCKASGY | 1622 |
| 2710 | | | CoV1 | | SARS-CoV2 | | Human Patient | | TFTSYDINWVRQATGQGLEWMGWMS | |
| | | | | | | | | | PNSGNTGYAQKFQGRVTMTRDTSISTA | |
| | | | | | | | | | YMELNSLRSEDTAVYYCARMRSGWPTH | |
| | | | | | | | | | GRPDDHWGQGTLVTVSS | |
| CoV2- | Ab | SARS-CoV1, | | | SARS-CoV2 | S; RBD | B-cells; SARS-CoV2 | 544 | EVQLVESGGGVVQPGGSLRLSCAASGF | 1623 |
| 2713 | | SARS-CoV2 | | | | | Human Patient | | TEDDYAMHWVRQAPGKGLEWVSLISG | |
| | | | | | | | | | DGGNTYYADSVKGRFTISRDNSKNSLYL | |
| | | | | | | | | | QMNSLRTEDTALYYCAKDEMAYPPSHH | |
| | | | | | | | | | YYYYYMDVWGKGTTVTVSS | |
| CoV2- | Ab | SARS-CoV1, | | | SARS-CoV2 | S; RBD | B-cells; SARS-CoV2 | 545 | QVQLVQSGAEVKTPGASVKVSCKASGY | 1624 |
| 2717 | | SARS-CoV2 | | | | | Human Patient | | TFTSYDINWVRQATGQGPEWMGWM | |
| | | | | | | | | | NPNSGNTGYAHKFQGRVTMTRNTSIST | |
| | | | | | | | | | AYMELSSLRSEDTAVYYCARGPSILTGFY | |
| | | | | | | | | | NPLDYWGQGTLVTVSS | |
| CoV2- | Ab | SARS-CoV2 | SARS- | | SARS-CoV1, | S; non- | B-cells; SARS-CoV2 | 546 | QLQLQESGPGLVKPSETLSLTCTVSGGSI | 1625 |
| 2718 | | | CoV1 | | SARS-CoV2 | RBD | Human Patient | | SSSNYYWGWIRQPPGKGLEWIGTIHYS | |
| | | | | | | | | | GISYYNPSLKSRVTISVDTSNNKFSLELSS | |
| | | | | | | | | | VTAADTAVYFCARRTYYDLWSAYSSTAY | |
| | | | | | | | | | YCMDVWGKGTTVTVSS | |
| CoV2- | Ab | SARS-CoV1, | | SARS-CoV2 | | S; RBD | B-cells; SARS-CoV2 | 547 | QVRLVQSGAEVKKPGSSVKVSCKASGG | 1626 |
| 2722 | | SARS-CoV2 | | | | | Human Patient | | TFSDYAISWVRQAPGQGLEWMGGIIPIF | |
| | | | | | | | | | GTANYAQKFQGRVTITADEFTITAYMEL | |
| | | | | | | | | | SSLRSEDTAVYYCARLSGSGWLGYAMD | |
| | | | | | | | | | VWGQGTTVTVSS | |
| CoV2- | Ab | SARS-CoV2 | SARS- | | SARS-CoV1, | S; non- | B-cells; SARS-CoV2 | 548 | QVQLVESGGGVVQPGRSLRLSCAASGF | 1627 |
| 2726 | | | CoV1 | | SARS-CoV2 | RBD | Human Patient | | TFSSYAMHWVRQAPGKGLEWVAVISN | |
| | | | | | | | | | DGRNKYYADSVKGRLTISRDNSKNTLYL | |
| | | | | | | | | | QMNSLRAEDTAVYYCARPSNWYFDLW | |
| | | | | | | | | | GRGTLVTVSS | |
| CoV2- | Ab | SARS-CoV2 | SARS- | SARS-CoV2 | | S; RBD | B-cells; SARS-CoV2 | 549 | EVQLVESGGGLVQPGRSLTLSCAASGFT | 1628 |
| 2730 | | | CoV1 | (weak) | | | Human Patient | | FDDYTMHWVRQAPGKGLEWVSGIDW | |
| | | | | | | | | | NGGTIGYADSVKGRFTISRDNAKNSLYL | |
| | | | | | | | | | QMNSLRAEDTALYYCAKAGYYAYVWGS | |
| | | | | | | | | | YRFEYFDNWGQGTLVTVSS | |
| CoV2- | Ab | SARS-CoV2 | SARS- | SARS-CoV2 | | S; RBD | B-cells; SARS-CoV2 | 550 | EVQLVESGGGLVQPGGSLRLSCAASGVT | 1629 |
| 2733 | | | CoV1 | | | | Human Patient | | VSSNYMSWVRQAPGKGLEWVSLIYSGG | |
| | | | | | | | | | STFYADSVKGRFTISRHNSKNTLYLQMN | |
| | | | | | | | | | SLRPEDTAVYYCARGPEPDAFDIWGQG | |
| | | | | | | | | | TMVTVSS | |
| CoV2- | Ab | SARS-CoV1, | | SARS-CoV2 | | S; RBD | B-cells; SARS-CoV2 | 551 | QVQLQESGPGLVKPSETLSLTCTVSGGS | 1630 |
| 2734 | | SARS-CoV2 | | (weak) | | | Human Patient | | VSSGSYYWSWIRQPPGKGLECIGYIYYSG | |
| | | | | | | | | | SSNYNPSLKSRVTISVDTSKNQFSLKMSS | |
| | | | | | | | | | VTAADTAVYYCAGSPVPPTIVGASYWG | |
| | | | | | | | | | QGTLVTVSS | |

| | | | | | | SEQ | | SEQ | | |
|---|---|---|---|---|---|---|---|---|---|---|
| | | Heavy V | Heavy J | Light V | Light J | ID | | ID | | |
| Name | VL | Gene | Gene | Gene | Gene | NO.: | CDRH3 | NO.: | CDRL3 | Sources |
| CoV2- | EIVLTQSPATLSLSPGERATLSCRASQS | IGHV1-46 | IGHJ5 | IGKV3-11 | IGKJ3 | 2626 | ARDLAGVPA | 3828 | QQRSNWP | Seth Zost et al., 2020 |
| 2697 | VSSYLAWYQQKPGQAPRLLIYDAYKR | (Human) | (Human) | (Human) | (Human) | | ALGCWFDP | | LIFT | (https://www.nature.co |
| | DTGIPARFSGSGSGTDFTLTISSLEPEDF | | | | | | | | | m/articles/s41591-020- |
| | AVYYCQQRSNWPLIFTFGPGTKVDIK | | | | | | | | | 0998-x) |
| CoV2- | QSVLTQPPSVSGVPGQRVTVSCTGSSS | IGHV3-30- | IGHJ4 | IGLV1-40 | IGLJ1 | 2627 | AKNLGPYCSG | 3829 | QSYDSSLS | Seth Zost et al., 2020 |
| 2700 | NIGAGFDVYWYQQFLGTAPKLLIYGN | 3 | (Human) | (Human) | (Human) | | GTCYSLVGDY | | GYV | (https://www.nature.co |
| | NNRPSGVPDRFSASKSGTSASLAITGL | (Human) | | | | | | | | m/articles/s41591-020- |
| | QAEDEADYYCQSYDSSLSGYVFGTGTK | | | | | | | | | 0998-x) |
| | VTVL | | | | | | | | | |
| CoV2- | DIQMTQSPSSLSASVGDRVTITCRASQ | IGHV3-13 | IGHJ4 | IGKV1-39 | IGKJ5 | 2628 | ARARGGYNW | 3830 | QQSYSTPPI | Seth Zost et al., 2020 |
| 2703 | SISSYLNWYQQKPGKAPKLLIYDASSLQ | (Human) | (Human) | (Human) | (Human) | | NFDY | | T | (https://www.nature.co |
| | SGVPSRFSGSGSGTDFTLTISSLQPEDF | | | | | | | | | m/articles/s41591-020- |
| | ATYYCQQSYSTPPITFGQGTRLEIK | | | | | | | | | 0998-x) |
| CoV2- | DIQMTQSPSSLSTSVGDRVTITCRASQ | IGHV3-30 | IGHJ4 | IGKV1-39 | IGKJ1 | 2629 | ARDQGTVVT | 3831 | QQSYSTPP | Seth Zost et al., 2020 |
| 2705 | SIRSYLNWYQQKPGKAPKLLIYVASSL | (Human) | (Human) | (Human) | (Human) | | HFDY | | WT | (https://www.nature.co |
| | QSGVPSRFSGSGSGTDFTLTISSLQPED | | | | | | | | | m/articles/s41591-020- |
| | FATYYCQQSYSTPPWTFGQGTKVEIK | | | | | | | | | 0998-x) |
| CoV2- | DIQMTQSPSSLSASVGDRVTITCQASQ | IGHV3-30 | IGHJ4 | IGKV1-33 | IGKJ3 | 2630 | AKNLGPYCSG | 3832 | QQYANLPF | Seth Zost et al., 2020 |
| 2709 | DISNYLNWYQQKPGKAPKLLIYDASNL | (Human) | (Human) | (Human) | (Human) | | GTCYSLVGDY | | T | (https://www.nature.co |
| | ETGVPSRFSGSGSGTDFTFTISSLQPED | | | | | | | | | m/articles/s41591-020- |
| | IATYYCQQYANLPFTFGPGTKVDIK | | | | | | | | | 0998-x) |
| CoV2- | QSVLTQPPSASGTPGQRVTISCSGSNS | IGHV1-8 | IGHJ4 | IGLV1-44 | IGLJ2 | 2631 | ARMRSGWPT | 3833 | VAWDDSR | Seth Zost et al., 2020 |
| 2710 | NIGSYTVNWYQQLPGTAPKLLIFGNN | (Human) | (Human) | (Human) | (Human) | | HGRPDDH | | NGLV | (https://www.nature.co |
| | QRPSGVPDRFSGSKSGTSASLAISGLQ | | | | | | | | | m/articles/s41591-020- |
| | SEDEADYYCVAWDDSRNGLVFGGGA | | | | | | | | | 0998-x) |
| | KLTVL | | | | | | | | | |
| CoV2- | SYELTQPPSVSVSPGQTARITCSTDALP | IGHV3-43 | IGHJ6 | IGLV3-25 | IGLJ2 | 2632 | AKDEMAYPP | 3834 | QSVDSSGT | Seth Zost et al., 2020 |
| 2713 | NEYIYWYQQKPGQAPVLVIYKDSERPS | (Human) | (Human) | (Human) | (Human) | | SHHYYYYYMD | | YPHVI | (https://www.nature.co |
| | GIPERFSGSSSGTTVTLTISGVQAEDEA | | | | | | V | | | m/articles/s41591-020- |
| | DYYCQSVDSSGTYPHVIFGGGTKLTVL | | | | | | | | | 0998-x) |
| CoV2- | DIQMTQSPSSLSASVGDRVTITCRASQ | IGHV1-8 | IGHJ4 | IGKV1-39 | IGKJ2 | 2633 | ARGPSILTGFY | 3835 | QQSYSTPY | Seth Zost et al., 2020 |
| 2717 | SIISYLNWYHQKPGKAPKLLIYAASSLQ | (Human) | (Human) | (Human) | (Human) | | NPLDY | | T | (https://www.nature.co |
| | SGVPSRFSGSGSGTDFTLTISSLQPEDF | | | | | | | | | m/articles/s41591-020- |
| | ATYYCQQSYSTPYTFGQGTKLEIK | | | | | | | | | 0998-x) |
| CoV2- | DIQLTQSPSFLSASVGDRVTITCRASQG | IGHV4-39 | IGHJ6 | IGKV1-9 | IGKJ4 | 2634 | ARRTYYDLWS | 3836 | QQLNSYPL | Seth Zost et al., 2020 |
| 2718 | ISSYLAWYQQKPGKAPKLLIYAASTLQS | (Human) | (Human) | (Human) | (Human) | | AYSSTAYYCM | | T | (https://www.nature.co |
| | GVPSRFSGSGSGTEFTLTISSLQPEDFA | | | | | | DV | | | m/articles/s41591-020- |
| | TYYCQQLNSYPLTFGGGTKVEIK | | | | | | | | | 0998-x) |
| CoV2- | QSALTQPASVSGSPGQSITISCTGTSSD | IGHV1-69 | IGHJ6 | IGLV2-14 | IGLJ2 | 2635 | ARLSGSGWL | 3837 | TSYTSSSTL | Seth Zost et al., 2020 |
| 2722 | VGGYNFVSWYQQHPGKAPKLIIYDVS | (Human) | (Human) | (Human) | (Human) | | GYAMDV | | NVV | (https://www.nature.co |
| | NRPSGVSNRFSGSKSGNTASLTISGLQ | | | | | | | | | m/articles/s41591-020- |
| | AEDEADYYCTSYTSSSTLNVVFGGGTK | | | | | | | | | 0998-x) |
| | LTVL | | | | | | | | | |
| CoV2- | QSALTQPASVSGSPGQSITISCTGTSSD | IGHV3-30 | IGHJ2 | IGLV2-23 | IGLJ2 | 2636 | ARPSNWYFD | 3838 | CSYASSSIV | Seth Zost et al., 2020 |
| 2726 | VGSYNLVSWYQQHPGKAPKLMIYEVS | (Human) | (Human) | (Human) | (Human) | | L | | V | (https://www.nature.co |
| | KRPSGVSNRFSGSKSGNTASLTISGLQ | | | | | | | | | m/articles/s41591-020- |
| | AEDEADYYCCSYASSSIVVFGGGTKLTV | | | | | | | | | 0998-x) |
| | L | | | | | | | | | |
| CoV2- | DIQMTQSPSSLSASVGDRVTITCRASQ | IGHV3-9 | IGHJ4 | IGKV1-39 | IGKJ1 | 2637 | AKAGYYAYV | 3839 | QQSYSTPP | Seth Zost et al., 2020 |
| 2730 | SISSYLNWYQQKPGKAPKLLLYAASSL | (Human) | (Human) | (Human) | (Human) | | WGSYRFEYFD | | WT | (https://www.nature.co |
| | QSGVPSRFSGSGSGTDFTLTISSLQPED | | | | | | N | | | m/articles/s41591-020- |
| | FATYYCQQSYSTPPWTFGQGTKVEIK | | | | | | | | | 0998-x) |
| CoV2- | DIQLTQSPSFLSASVGDRVTITCRASQG | IGHV3-53 | IGHJ3 | IGKV1-9 | IGKJ3 | 2638 | ARGPEPDAFD | 3840 | QQLNSYSF | Seth Zost et al., 2020 |
| 2733 | ISSYLAWYQQKPGKAPKLLIYAASTLQS | (Human) | (Human) | (Human) | (Human) | | | | ET | (https://www.nature.co |
| | GVPSRFSGSGSGTEFTLTISSLQPEDFA | | | | | | | | | m/articles/s41591-020- |
| | TYYCQQLNSYSFETFGPGTKVAIK | | | | | | | | | 0998-x) |
| CoV2- | NFMLTQPHSVSESPGKTVTFSCTGSSG | IGHV4-61 | IGHJ4 | IGLV6-57 | IGLJ2 | 2639 | AGSPVPPTIV | 3841 | QSYDGINR | Seth Zost et al., 2020 |
| 2734 | SIASNYVQWYQQRPGSAPTTVIYEDN | (Human) | (Human) | (Human) | (Human) | | GASY | | WLV | (https://www.nature.co |
| | QRPSGVPDRFSGSIDSSSNSASLTISGL | | | | | | | | | m/articles/s41591-020- |
| | KTEDEADYYCQSYDGINRWLVFGGGT | | | | | | | | | 0998-x) |
| | KLTVL | | | | | | | | | |

| | | | | | Not | | | | | |
|---|---|---|---|---|---|---|---|---|---|---|
| | Ab | | | Neutral- | Neutral- | | | SEQ | | SEQ |
| | or | | Doesn't | ising | ising | Protein + | | ID | | ID |
| Name | Nb | Binds to | Bind to | Vs | Vs | Epitope | Origin | NO.: | VH or VHH | NO.: |
| CoV2 | Ab | SARS-CoV1, | | | SARS-CoV2 | S; RBD | B-cells; SARS-CoV2 | 552 | QVQLVESGGGVVQPGRSLRLSCAASGF | 1631 |
| 2736 | | SARS-CoV2 | | | | | Human Patient | | TFSDYAMHWVRQAPGKGLEWVADISF | |
| | | | | | | | | | DGSNKYYADSVKGRFTISRDSSENTLYLQ | |
| | | | | | | | | | MDSLRADDTAVYYCARDLSTTWYLEM | |
| | | | | | | | | | WGPDAFDIWGQGTVVTVSS | |
| CoV2- | Ab | SARS-CoV1, | | | SARS-CoV2 | S; RBD | B-cells; SARS-CoV2 | 553 | QVQLVESGGGVVQPGRSLRLSCAASGF | 1632 |
| 2740 | | SARS-CoV2 | | | | | Human Patient | | TFRRYGMYWVRQAPGKGLEWVAVISY | |
| | | | | | | | | | DGTDKYYTDSVKGRFTISRDNSKNTLYLQ | |
| | | | | | | | | | MNSLRAEDTAVYYCAKKGGPYCGGGN | |
| | | | | | | | | | CYAGYFDYWGQGTLVTVSS | |
| CoV2- | Ab | SARS-CoV1, | | | SARS-CoV2 | S; RBD | B-cells; SARS-CoV2 | 554 | QVQLQQWGAGLLKPSETLSLTCAVSGG | 1633 |
| 2749 | | SARS-CoV2 | | | | | Human Patient | | SFSAYYWSWIRQPPGKGLEWIGEINHS | |
| | | | | | | | | | GSTNYNPSLRSRVTISVDTSKNQFSLKLSS | |
| | | | | | | | | | VTAADTAVYYCARVGYSQGYYYYYMDV | |
| | | | | | | | | | WGKGTTVTVSS | |
| CoV2- | Ab | SARS-CoV2 | SARS- | | SARS-CoV1, | S; RBD | B-cells; SARS-CoV2 | 555 | EVQVVESGGGLVQPGRSLRLSCVSSGFI | 1634 |
| 2751 | | | CoV1 | | SARS-CoV2 | | Human Patient | | FDDYVMHWVRQRPGKGLEWVAGITYN | |
| | | | | | | | | | GGILGYGDSVKGRFIIARDNVRGFLSLQ | |
| | | | | | | | | | MGDLRTEDTALYYCARDYCSSTTCPAET | |
| | | | | | | | | | YYYMDVWGKGTAVTVSS | |
| CoV2- | Ab | SARS-CoV2 | SARS- | SARS-CoV2 | | S; RBD | B-cells; SARS-CoV2 | 556 | EVQLVESGGGLIQPGGSLRLSCAASEVT | 1635 |
| 2752 | | | CoV1 | | | | Human Patient | | VSSNYMSWVRQAPGKGLEWVSLIYSGG | |
| | | | | | | | | | TTYYADSVKGRFTISRDNSKNTLYLQMN | |
| | | | | | | | | | SLRAEDTAVYYCARDFLRWHDLWGQG | |
| | | | | | | | | | TLVTVSS | |
| CoV2- | Ab | SARS-CoV1, | | | SARS-CoV2 | S; RBD | B-cells; SARS-CoV2 | 557 | EVQLVESGGGLVQPGGSLRLSCAASGFT | 1636 |
| 2753 | | SARS-CoV2 | | | | | Human Patient | | FSSYDMHWVRQATGKGLEWVSTIGTA | |
| | | | | | | | | | GDTYYPDSVKGRFTISRENAKNSLFLQM | |
| | | | | | | | | | NSLRAGDTAVYYCARVDFDILTGYYSNW | |
| | | | | | | | | | GQGTLVTVSS | |
| CoV2- | Ab | SARS-CoV2 | SARS- | | SARS-CoV1, | S; RBD | B-cells; SARS-CoV2 | 558 | EAQLLESGGALVQPGGSLRLSCAASGFT | 1637 |
| 2756 | | | CoV1 | | SARS-CoV2 | | Human Patient | | FSCCAMGWVRQAPGRGLEWVSSIHDD | |
| | | | | | | | | | GVGTFYAVSVKGRFSISRDNSKNTVYLQ | |
| | | | | | | | | | MNGLRAEDTGVYYCAKWAGPIVMKYY | |
| | | | | | | | | | LQYWGQGALVTVSS | |
| CoV2 | Ab | SARS-CoV1, | | | SARS-CoV2 | S; RBD | B-cells; SARS-CoV2 | 559 | EVQLVESGGGLVQPGGSLRLSCAASGFT | 1638 |
| 2758 | | SARS-CoV2 | | | | | Human Patient | | FSSYDMHWVRQATGKGLEWVSAIGTA | |
| | | | | | | | | | GDTYYPDSVKGRFTISRENAKNSLYLQM | |
| | | | | | | | | | NSLRAGDTAVYYCARGGDSGYDLGAWY | |
| | | | | | | | | | FDLWGRGTLVTVSS | |
| CoV2- | Ab | SARS-CoV2 | SARS- | | SARS-CoV1, | S; RBD | B-cells; SARS-CoV2 | 560 | EVQLVQSGAEVKKPGESLKISCKGSGYSF | 1639 |
| 2759 | | | CoV1 | | SARS-CoV2 | | Human Patient | | TNYWIGWVRQMPGKGLEWMGIIYPG | |
| | | | | | | | | | DSDTRYSPSFQGQVTISADKSISTAYLQW | |
| | | | | | | | | | SSLKASDTAMYYCARTPTLYNWFHPWG | |
| | | | | | | | | | QGTPVTVSS | |
| CoV2- | Ab | SARS-CoV2 | SARS- | SARS-CoV2 | | S; RBD | B-cells; SARS-CoV2 | 561 | QVTLRESGPALVKPTQTLTLTCTFSGFSLS | 1640 |
| 2760 | | | CoV1 | (weak) | | | Human Patient | | TSGLCVSWIRQPPGKALEWLARIDWDD | |
| | | | | | | | | | DKYYNTSLRTRLTISKDTSKNQVVLTMTN | |
| | | | | | | | | | MDPVDTATYYCARATTFFYGMDVWGQ | |
| | | | | | | | | | GTTVTVSS | |
| CoV2- | Ab | SARS-CoV2 | SARS- | | SARS-CoV1, | S; RBD | B-cells; SARS-CoV2 | 562 | QLQLQESGPGLVKPSETLSLTCTVSGGSI | 1641 |
| 2762 | | | CoV1 | | SARS-CoV2 | | Human Patient | | SSSSYYWGWIRQPPGKGLEWIGSIYYSG | |
| | | | | | | | | | ITYYNPSLKSRVTISVDTSKNQFSLKLSSV | |
| | | | | | | | | | TAADTAVYYCARHQRYCSSSSCHVWDYW | |
| | | | | | | | | | GQGTLVTVSS | |
| CoV2- | Ab | SARS-CoV1, | | | SARS-CoV2 | S; RBD | B-cells; SARS-CoV2 | 563 | EVQLVESGGGLVQPGRSLRLSCAASGFT | 1642 |
| 2765 | | SARS-CoV2 | | | | | Human Patient | | FDDYAMNWVRQPPGKGLEWVSGISW | |
| | | | | | | | | | NSDSIGYADSVKGRFTISRDNAKNSLYLQ | |
| | | | | | | | | | MNSLRAEDTAMYYCAKGRGAGYTSYM | |
| | | | | | | | | | DVWGKGTTVTVSS | |
| CoV2- | Ab | SARS-CoV2 | SARS- | | SARS-CoV1, | S; RBD | B-cells; SARS-CoV2 | 564 | EVQLVESGGGLVQPGGSLRLSCAASGFT | 1643 |
| 2767 | | | CoV1 | | SARS-CoV2 | | Human Patient | | VSSNYMSWVRQAPGKGLEWVSVIYPG | |
| | | | | | | | | | GSAFYADSVKGRFTISRHNSNNTLCLQM | |
| | | | | | | | | | NSLRTEDTAVYYCARSYDILTGYRDAFDI | |
| | | | | | | | | | WGQGTMVTVSS | |
| CoV2- | Ab | SARS-CoV2 | SARS- | | SARS-CoV1, | S; RBD | B-cells; SARS-CoV2 | 565 | QVQLVESGGGVVQPGRSLRLSCAASGF | 1644 |
| 2768 | | | CoV1 | | SARS-CoV2 | | Human Patient | | TFSSYAMHWVRQAPGKGLEWVAVISY | |
| | | | | | | | | | DGSNKYYADSVKGRFTISRDNSKNTLYL | |
| | | | | | | | | | QMNSLRAEDTAVYYCARDDNSPQGSG | |
| | | | | | | | | | WYFYYYYAMDVWGQGTTVTVSS | |

| | | | | | | SEQ | | SEQ | | |
|---|---|---|---|---|---|---|---|---|---|---|
| | | Heavy V | Heavy J | Light V | Light J | ID | | ID | | |
| Name | VL | Gene | Gene | Gene | Gene | NO.: | CDRH3 | NO.: | CDRL3 | Sources |
| CoV2 | DIQMTQSPSTLSASIGDRVTITCRASQS | IGHV3-30- | IGHJ3 | IGKV1-5 | IGKJ2 | 2640 | ARDLSTTWYL | 3842 | QQYNSYPY | Seth Zost et al., 2020 |
| 2736 | ISSWLAWYQQIPGKAPKLLIYKASSLES | 3 | (Human) | (Human) | (Human) | | EMWGPDAF | | T | (https://www.nature.co |
| | GVPSRFSGSGSGTEFTLTISSLQPDDFA | (Human) | | | | | DI | | | m/articles/s41591-020- |
| | TYYCQQYNSYPYTFGQGTKLEIK | | | | | | | | | 0998-x) |
| CoV2- | DIQMTQSPSSLSASIGDRVTITCRASQ | IGHV3-30 | IGHJ4 | IGKV1-39 | IGKJ2 | 2641 | AKKGGPYCG | 3843 | QQSSSSPIT | Seth Zost et al., 2020 |
| 2740 | NIRSYLNWYQHKPGKAPKLLIYAASTL | (Human) | (Human) | (Human) | (Human) | | GGNCYAGYF | | | (https://www.nature.co |
| | QSGVPSRFSGSESGTDFTLTISSLQPED | | | | | | DY | | | m/articles/s41591-020- |
| | FATYYCQQSSSSPITFGQGTKLEIK | | | | | | | | | 0998-x) |
| CoV2- | DIQMTQSPSSLSASVGDRVTITCRASQ | IGHV4-34 | IGHJ6 | IGKV1-39 | IGKJ4 | 2642 | ARVGYSQGYY | 3844 | QQSYTTLL | Seth Zost et al., 2020 |
| 2749 | SISNYLNWYQQKPGKAPKLLIYAASSL | (Human) | (Human) | (Human) | (Human) | | YYYMDV | | T | (https://www.nature.co |
| | QSGVPSRFSGSGSGTDFSLTISSLQPED | | | | | | | | | m/articles/s41591-020- |
| | FATYSCQQSYTTLLTFGGGTKVEIK | | | | | | | | | 0998-x) |
| CoV2- | SYELAQPPSVSVAPGETATIFCRATYIG | IGHV3-9 | IGHJ6 | IGLV3-21 | IGLJ2 | 2643 | ARDYCSSTTC | 3845 | QVWDGIN | Seth Zost et al., 2020 |
| 2751 | RKNVQWYQQKPGQAPVLVVYDDSD | (Human) | (Human) | (Human) | (Human) | | PAETYYYMDV | | DRVV | (https://www.nature.co |
| | RPSGIPGRFSGSNSGDTATLTISRIEAG | | | | | | | | | m/articles/s41591-020- |
| | DEAAYYCQVWDGINDRVVFGGGTKL | | | | | | | | | 0998-x) |
| | TVL | | | | | | | | | |
| CoV2- | DIQMTQSPSSLSASVGDRVTITCQASQ | IGHV3-53 | IGHJ5 | IGKV1-33 | IGKJ4 | 2644 | ARDFLRWHD | 3846 | QQYDNLP | Seth Zost et al., 2020 |
| 2752 | DINNYLNWYQQKPGKAPKLLIYDASN | (Human) | (Human) | (Human) | (Human) | | L | | PV | (https://www.nature.co |
| | LETGVPLRFSGSGSGTDFTFTISSLQPE | | | | | | | | | m/articles/s41591-020- |
| | DIATYYCQQYDNLPPVFGGGTKVEIK | | | | | | | | | 0998-x) |
| CoV2- | DFQMTQSPSSLSASVGDRVTITCRASQ | IGHV3-13 | IGHJ4 | IGKV1-39 | IGKJ1 | 2645 | ARVDFDILTG | 3847 | QQSYSSE | Seth Zost et al., 2020 |
| 2753 | SISTYLNWYQQKPGKAPNLLIFAASSLH | (Human) | (Human) | (Human) | (Human) | | YYSN | | WT | (https://www.nature.co |
| | SGVPSRFSGSGSGTDFTLSISSLQPEDF | | | | | | | | | m/articles/s41591-020- |
| | ATYYCQQSYSSEWTFGQGTKVEIK | | | | | | | | | 0998-x) |
| CoV2- | QSLLTQPPSVSGAPGQRVTLSCAGATS | IGHV3-23 | IGHJ4 | IGLV1-40 | IGLJ3 | 2646 | AKWAGPIVM | 3848 | QSYDISLG | Seth Zost et al., 2020 |
| 2756 | NIGAGSDVHWYQQLPGTAPKLLIYYN | (Human) | (Human) | (Human) | (Human) | | KYYLQY | | GWV | (https://www.nature.co |
| | TNRPSGVPDRFSGSKSATSASLVITGL | | | | | | | | | m/articles/s41591-020- |
| | QTEDEADYYCQSYDISLGGWVFGGGT | | | | | | | | | 0998-x) |
| | KLTVL | | | | | | | | | |
| CoV2 | DIQMTQSPSSLSASVGDRVTITCRASQ | IGHV3-13 | IGHJ2 | IGKV1-39 | IGKJ5 | 2647 | ARGGDSGYD | 3849 | QQSYSMP | Seth Zost et al., 2020 |
| 2758 | SVSIYLNWYQQKPGKAPKLLIYAASSL | (Human) | (Human) | (Human) | (Human) | | LGAWYFDL | | PIT | (https://www.nature.co |
| | QSGVPSRFSGSGSGTDFTLTVSSLQPE | | | | | | | | | m/articles/s41591-020- |
| | DFATYYCQQSYSMPPITFGQGTRLEIK | | | | | | | | | 0998-x) |
| CoV2- | QSVLTQPPSASGTPGQRVTISCSGSSS | IGHV5-51 | IGHJ5 | IGLV1-44 | IGLJ3 | 2648 | ARTPTLYNWF | 3850 | AAWDDSL | Seth Zost et al., 2020 |
| 2759 | NIGSNSLNWYQQLPGTAPKLLIYSNN | (Human) | (Human) | (Human) | (Human) | | HP | | NGSWV | (https://www.nature.co |
| | QRPSGVPDRFSGSKSGTSASLAISGLQ | | | | | | | | | m/articles/s41591-020- |
| | SEDEADYYCAAWDDSLNGSWVFGGG | | | | | | | | | 0998-x) |
| | TKLTVL | | | | | | | | | |
| CoV2- | QSVLTQPPSASGTPGQRVTISCSGSRY | IGHV2-70 | IGHJ6 | IGLV1-47 | IGLJ2 | 2649 | ARATTFFYGM | 3851 | AAWDDSL | Seth Zost et al., 2020 |
| 2760 | NIGSNYVYWYQQLPGTAPRLLIYSNN | (Human) | (Human) | (Human) | (Human) | | DV | | SGL | (https://www.nature.co |
| | QRPSGVPDRFSGSKSGTSASLAISGLRS | | | | | | | | | m/articles/s41591-020- |
| | EDEADYYCAAWDDSLSGLIFGGGTKLT | | | | | | | | | 0998-x) |
| | VQ | | | | | | | | | |
| CoV2- | QSALTQPASVSGSPGQSITISCTGTSSD | IGHV4-39 | IGHJ4 | IGLV2-23 | IGLJ3 | 2650 | ARHQRYCSSS | 3852 | CSYAGSST | Seth Zost et al., 2020 |
| 2762 | VGSYNLVSWYQQHPGKAPKLMIYEGS | (Human) | (Human) | (Human) | (Human) | | SCHVWDY | | WL | (https://www.nature.co |
| | KRPSGVSNRFSGSKSGNTASLTISGLQ | | | | | | | | | m/articles/s41591-020- |
| | AEDEADYYCCSYAGSSTWLFGGGTKLT | | | | | | | | | 0998-x) |
| | VL | | | | | | | | | |
| CoV2- | SYVLTQPPSVSVAPGKTARITCEGNNI | IGHV3-9 | IGHJ6 | IGLV3-21 | IGLJ2 | 2651 | AKGRGAGYTS | 3853 | QVWDSSS | Seth Zost et al., 2020 |
| 2765 | GSKSVHWYQQKPGQAPVLVVYDDSG | (Human) | (Human) | (Human) | (Human) | | YMDV | | DHHVV | (https://www.nature.co |
| | RPSGIPERFSGSNSGNTATLTISRVEAG | | | | | | | | | m/articles/s41591-020- |
| | DEADYFCQVWDSSSDHHVVFGGGTK | | | | | | | | | 0998-x) |
| | LTVL | | | | | | | | | |
| CoV2- | QSVLTQPPSVSGAPGQRVTISCTGSSS | IGHV3-53 | IGHJ3 | IGLV1-50 | IGLJ2 | 2652 | ARSYDILTGY | 3854 | VAWDDSR | Seth Zost et al., 2020 |
| 2767 | NIGAGYDVHWYQQLPETAPKLLIYAN | (Human) | (Human) | (Human) | (Human) | | RDAFDI | | NGLV | (https://www.nature.co |
| | SNRPSGVPDRFSGSKSGTSASLAISGL | | | | | | | | | m/articles/s41591-020- |
| | QSEAEADYYCVAWDDSRNGLVFGGG | | | | | | | | | 0998-x) |
| | AKLTVL | | | | | | | | | |
| CoV2- | QSVLTQPPSVSAAPGQKVTISCSGSSS | IGHV3-30- | IGHJ6 | IGLV1-51 | IGLJ1 | 2653 | ARDDNSPQG | 3855 | GTWDSSLS | Seth Zost et al., 2020 |
| 2768 | NIGNNYVSWYQQLPGTAPKLLIYDNN | 3 (Human) | (Human) | (Human) | (Human) | | SGWYFYYYYA | | AYV | (https://www.nature.co |
| | ERPSGIPDRFSGSKSGTSATLGITGLQT | | | | | | MDV | | | m/articles/s41591-020- |
| | GDEADYYCGTWDSSLSAYVFGTGTKV | | | | | | | | | 0998-x) |
| | TVL | | | | | | | | | |

| | | | | | Not | | | | | |
|---|---|---|---|---|---|---|---|---|---|---|
| | Ab | | | Neutral- | Neutral- | | | SEQ | | SEQ |
| | or | | Doesn't | ising | ising | Protein + | | ID | | ID |
| Name | Nb | Binds to | Bind to | Vs | Vs | Epitope | Origin | NO.: | VH or VHH | NO.: |
| CoV2- | Ab | SARS-CoV2 | SARS- | | SARS-CoV1, | S; NTD | B-cells; SARS-CoV2 | 566 | QVQLVESGGGVVQPGRSLRLSCAASGF | 1645 |
| 2769 | | | CoV1 | | SARS-CoV2 | | Human Patient | | TFSTYAMHWVRQAPGKGLEWVAVISY | |
| | | | | | | | | | DGSNKYYADSVKGRFTISRDNSKNTLYL | |
| | | | | | | | | | QMIGLRAEDTAVYYCARDWAPTYYDM | |
| | | | | | | | | | PSAFDIWGQGTMVTVSS | |
| CoV2- | Ab | SARS-CoV1 | | | SARS-CoV2 | S; non- | B-cells; SARS-CoV2 | 567 | EVQLVESGGGLVQPGGSLRLSCAASGFT | 1646 |
| 2774 | | SARS-CoV2 | | | | RBD | Human Patient | | FSSYWMTWVRQAPGKGLEWVANIKQ | |
| | | | | | | | | | DGSEKYYVDSVKGRFTISRDNAKNSLSL | |
| | | | | | | | | | QMNSLRVEDTAVYYCVRLGVSSWYFDY | |
| | | | | | | | | | WGQGTLVTVSS | |
| CoV2- | Ab | SARS-CoV1, | | | SARS-CoV2 | S; non- | B-cells; SARS-CoV2 | 568 | EVQLVESGGDLVQPGGSLRLTCAASGFT | 1647 |
| 2776 | | SARS-CoV2 | | | | RBD | Human Patient | | FSSHWMTWVRQAPGKGLEWVANIKE | |
| | | | | | | | | | DGREKYYVDSVKGRLTISRDNAKNSLYL | |
| | | | | | | | | | QMNSLRAEDTAVYYCARVVVEVATNKG | |
| | | | | | | | | | IHGVDYYYYYYMDVWGKGTTVTVSS | |
| CoV2- | Ab | SARS-CoV2 | SARS- | SARS-CoV2 | | S; RBD | B-cells; SARS-CoV2 | 569 | QVQLQQWGAGLLKPSETLSRTCAVYGA | 1648 |
| 2780 | | | CoV1 | (weak) | | | Human Patient | | SFSNYYWSWIRQPPGKGLEWIGEINHSE | |
| | | | | | | | | | NTNYNPSLKSRVTISVDTSKNQFSLRLSS | |
| | | | | | | | | | VTAADTAVYYCARLRYSSSGGHIFDYWG | |
| | | | | | | | | | QGTLVTVSS | |
| CoV2- | Ab | SARS-CoV1, | | | SARS-CoV2 | S; RBD | B-cells; SARS-CoV2 | 570 | QVQLVQSGAEVKKPGSSVKVSCKASGG | 1649 |
| 2783 | | SARS-CoV2 | | | | | Human Patient | | TFSSYAISWVRQAPGQGLEWMGGIIPIF | |
| | | | | | | | | | GTANYAQKFQGRVTITADESTSTAYMEL | |
| | | | | | | | | | SSLRSEDTAVYYCARGLTGSSAYKDEIYF | |
| | | | | | | | | | DYWGQGTLVTVSS | |
| CoV2- | Ab | SARS-CoV2 | SARS- | | SARS-CoV1, | S; non- | B-cells; SARS-CoV2 | 571 | QVQLQESGPGLVKPSETLSLTCTVSGGSI | 1650 |
| 2784 | | | CoV1 | | SARS-CoV2 | RBD | Human Patient | | SSYYWSWIRQPPGKGLEWIGYIYYSGST | |
| | | | | | | | | | KYNPSLKSRVTISVDTSKNQFSLKLSSVTA | |
| | | | | | | | | | ADTAVYYCARDGGNAYSSGWYRYYYH | |
| | | | | | | | | | MDVWGKGTTVTVSS | |
| CoV2- | Ab | SARS-CoV2 | SARS- | | SARS-CoV1, | S; RBD | B-cells; SARS-CoV2 | 572 | EVQLVESGGGLVQPGGSLRLSCAASGFT | 1651 |
| 2786 | | | CoV1 | | SARS-CoV2 | | Human Patient | | FSSYDLHWVRQGTGKRLEWVSAIGTAG | |
| | | | | | | | | | DTYYLGSVKGRFTISRENAKNSLYLQMN | |
| | | | | | | | | | SLRAGDTAVYYCARVLYDSSGFYNWFDP | |
| | | | | | | | | | WGQGTLVTVSS | |
| CoV2- | Ab | SARS-CoV2 | SARS- | | SARS-CoV1, | S; RBD | B-cells; SARS-CoV2 | 573 | QVQLVQSGAEVKKPGASVRVSCKAPGY | 1652 |
| 278 | | | CoV1 | | SARS-CoV2 | | Human Patient | | TFTTYYIHWVRQAPGQGLEWMGIINPS | |
| | | | | | | | | | AGSTTYAQKFQGRVTMTRDTSTSTVYM | |
| | | | | | | | | | ELSSLRSEDTAVYYCARGFHVPAALRNW | |
| | | | | | | | | | FDPWGQGTLVTVSS | |
| CoV2- | Ab | SARS-CoV2 | SARS- | SARS-CoV2 | | S; RBD | B-cells; SARS-CoV2 | 574 | EVQLVESGGGLVQPGGSLRLSCAASGFT | 1653 |
| 2790 | | | CoV1 | | | | Human Patient | | VSSNYMSWVRQAPGKGLEWVSVIYPG | |
| | | | | | | | | | GSAFYADSVKGRFTISRHNSNNTLCLQM | |
| | | | | | | | | | NSLRTEDTAVYYCARSYDILTGYRDAFDI | |
| | | | | | | | | | WGQGTMVTVSS | |
| CoV2- | Ab | SARS-CoV1, | | | SARS-CoV2 | S; RBD | B-cells; SARS-CoV2 | 575 | EAQLVESGGGLVQPGGSLRLSCEASGFI | 1654 |
| 2794 | | SARS-CoV2 | | | | | Human Patient | | FSSYWMSWVRQAPGKGLEWVANIKQ | |
| | | | | | | | | | DGSEKYYVDSVKGRFTISRDNAKNSLYL | |
| | | | | | | | | | QMNSLRAEDTAVYYCARVNDGRPNPLE | |
| | | | | | | | | | YYFDYWGQGTLVTVSS | |
| CoV2- | Ab | SARS-CoV2 | SARS- | | SARS-CoV1, | S; RBD | B-cells; SARS-CoV2 | 576 | QVQLQESGPGLVKPSQTLSLTCTVSGDSI | 1655 |
| 2796 | | | CoV1 | | SARS-CoV2 | | Human Patient | | SSGRYYWSWIRQHPGKGLEWIGFVYYS | |
| | | | | | | | | | GSTYYNPSLKSRVTISVDTSKNQFSLRLSS | |
| | | | | | | | | | VTAADTAVYYCARETYSAYEMPPYFDY | |
| | | | | | | | | | WGQGTLVTVSS | |
| CoV2- | Ab | SARS-CoV1, | | | SARS-CoV2 | S; RBD | B-cells; SARS-CoV2 | 577 | EVQLVQSGAEVKKPGESLKISCKGSGYSF | 1656 |
| 2797 | | SARS-CoV2 | | | | | Human Patient | | TSYWIGWVRQMPGKGLEWMGIIQPG | |
| | | | | | | | | | DSDTRYSPSFQGQVTMSADKSTSTAYLQ | |
| | | | | | | | | | WSSLKASDTAMYYCARDLIIESTIAARPG | |
| | | | | | | | | | YYGMDVWGQGTTVTVSS | |
| CoV2- | Ab | SARS-CoV2 | SARS- | | SARS-CoV1, | S; RBD | B-cells; SARS-CoV2 | 578 | QVHLVQSGAEVKKPGASVKLSCKASGYT | 1657 |
| 2801 | | | CoV1 | | SARS-CoV2 | | Human Patient | | FTNYLLHWVRQAPGQGLEWMGNVNP | |
| | | | | | | | | | SRGTATYPQKLDDRVTMTSDKSASTIYM | |
| | | | | | | | | | ELSGLRSEDTAIYYCARERSGTYFFDYWG | |
| | | | | | | | | | QGTLLTVSS | |
| CoV2- | Ab | SARS-CoV2 | SARS- | SARS-CoV2 | | S; RBD | B-cells; SARS-CoV2 | 579 | QVTLRESGPALVKPTQTLTLTCTFSGFSLT | 1658 |
| 2807 | | | CoV1 | | | | Human Patient | | TSGMCVSWIRQPPGKALEWLARIDWD | |
| | | | | | | | | | DDKYYSTSLQTRLTISKDTSKNQVVLTMT | |
| | | | | | | | | | NMDPVDTATYYCARETPVTAIDYWGQ | |
| | | | | | | | | | GTLVTVSS | |

| | | | | | | SEQ | | SEQ | | |
|---|---|---|---|---|---|---|---|---|---|---|
| | | Heavy V | Heavy J | Light V | Light J | ID | | ID | | |
| Name | VL | Gene | Gene | Gene | Gene | NO.: | CDRH3 | NO.: | CDRL3 | Sources |
| CoV2- | SYVLTQPPSVSVAPGKTARITCGGNNI | IGHV3-30- | IGHJ3 | IGLV3-21 | IGLJ3 | 2654 | ARDWAPTYY | 3856 | QVWDSSS | Seth Zost et al., 2020 |
| 2769 | GNKGVHWYQQKPGQAPVLVVDDDS | 3 | (Human) | (Human) | (Human) | | DMPSAFDI | | DHPGV | (https://www.nature.co |
| | DRPSGIPERFSGSNSGNTATLIISSVEV | (Human) | | | | | | | | m/articles/s41591-020- |
| | GDEADFYCQVWDSSSDHPGVFGGGT | | | | | | | | | 0998-x) |
| | KLTVL | | | | | | | | | |
| CoV2- | SYELTQPPSVSVSPGQTASITCSGDKLG | IGHV3-7 | IGHJ4 | IGLV3-1 | IGLJ3 | 2655 | VRLGVSSWYF | 3857 | QAWGSSR | Seth Zost et al., 2020 |
| 2774 | DKYACWYQQKPGQSPVLVIYQDTKRP | (Human) | (Human) | (Human) | (Human) | | DY | | GV | (https://www.nature.co |
| | SGIPERFSGSNSGNTATLTISGTQAMD | | | | | | | | | m/articles/s41591-020- |
| | EADYYCQAWGSSRGVFGGGTKLTVL | | | | | | | | | 0998-x) |
| CoV2- | SSELTQDPAVSVALGQTVRITCQGDSL | IGHV3-7 | IGHJ6 | IGLV3-19 | IGLJ3 | 2656 | ARVVVEVAT | 3858 | NSRDNSG | Seth Zost et al., 2020 |
| 2776 | RSYYASWYQQKPGQAPVVVIYGKNN | (Human) | (Human) | (Human) | (Human) | | NKGIHGVDYY | | NLNWV | (https://www.nature.co |
| | RPSGIPDRFSGSSSGNKASLTITGAQA | | | | | | YYYYMDV | | | m/articles/s41591-020- |
| | GDEADYYCNSRDNSGNLNWVFGGGT | | | | | | | | | 0998-x) |
| | KLTVL | | | | | | | | | |
| CoV2- | DIQMTQSPSSLSASVGDRVTITCQASQ | IGHV4-34 | IGHJ4 | IGKV1-33 | IGKJ2 | 2657 | ARLRYSSSGG | 3859 | QQYDNLPY | Seth Zost et al., 2020 |
| 2780 | DINNYLNWYQQKSGKAPKLLIYDASNL | (Human) | (Human) | (Human) | (Human) | | HIFDY | | T | (https://www.nature.co |
| | ETGVPSRFSGSGSGTDFTFTINSLQPED | | | | | | | | | m/articles/s41591-020- |
| | IATYYCQQYDNLPYTFGQGTKLEIK | | | | | | | | | 0998-x) |
| CoV2- | SYELTQPPSVSVSPGQTARITCSGDALP | IGHV1-69 | IGHJ4 | IGLV3-25 | IGLJ2 | 2658 | ARGLTGSSAY | 3860 | QSADSSGS | Seth Zost et al., 2020 |
| 2783 | KQYAYWYQQKPGQAPVLVIYKDTERP | (Human) | (Human) | (Human) | (Human) | | KDEIYFDY | | R | (https://www.nature.co |
| | SGIPERFSGSSSGTTVTLTISGVQAEDE | | | | | | | | | m/articles/s41591-020- |
| | ADYYCQSADSSGSRFGGGTKLTVL | | | | | | | | | 0998-x) |
| CoV2- | EIVMTQSPATLSVSPGERATLSCRASQ | IGHV4-59 | IGHJ6 | IGKV3-15 | IGKJ2 | 2659 | ARDGGNAYS | 3861 | QQYNNWP | Seth Zost et al., 2020 |
| 2784 | SVSSNLAWYQQKPGQAPRLLIYGAST | (Human) | (Human) | (Human) | (Human) | | SGWYRYYYH | | YT | (https://www.nature.co |
| | RATVIPARFSGSGSGTEFTLTISSLQSED | | | | | | MDV | | | m/articles/s41591-020- |
| | FAVYYCQQYNNWPYTFGQGTKLEIK | | | | | | | | | 0998-x) |
| CoV2- | DIQMTQSPSSLSASVGDRVTITCRASQ | IGHV3-13 | IGHJ5 | IGKV1-39 | IGKJ1 | 2660 | ARVLYDSSGF | 3862 | QQSYEIPP | Seth Zost et al., 2020 |
| 2786 | SISSYLNWYQQKPGKAPKLLIYAASSLE | (Human) | (Human) | (Human) | (Human) | | YNWFDP | | WT | (https://www.nature.co |
| | SGVPSRFSGSGSGTDFTLTISSLQPEDF | | | | | | | | | m/articles/s41591-020- |
| | ATYYCQQSYEIPPWTFGQGTKVEIK | | | | | | | | | 0998-x) |
| CoV2- | QSVLTQPPSASGTPGQRVTISCSGSSS | IGHV1-46 | IGHJ5 | IGLV1-44 | IGLJ2 | 2661 | ARGFHVPAAL | 3863 | ATWDDSL | Seth Zost et al., 2020 |
| 278 | NIGSNTVNWYQQLPGTAPKLLIYNNN | (Human) | (Human) | (Human) | (Human) | | RNWFDP | | NGPV | (https://www.nature.co |
| | QRPSGVPDRLSGSKSGTSASLAISGLQ | | | | | | | | | m/articles/s41591-020- |
| | SEDEADYYCATWDDSLNGPVFGGGT | | | | | | | | | 0998-x) |
| | KLTVL | | | | | | | | | |
| CoV2- | QSVLTQPPSVSGAPGQRVTISCTGSSS | IGHV3-53 | IGHJ3 | IGLV1-40 | IGLJ2 | 2662 | ARSYDILTGYR | 3864 | QSYDSRLS | Seth Zost et al., 2020 |
| 2790 | NIGSGSDVHWYQQLPGTAPKLLIYGN | (Human) | (Human) | (Human) | (Human) | | DAFDI | | GFVV | (https://www.nature.co |
| | TNRPSGVPDRFSGSKSGTSASLAITGL | | | | | | | | | m/articles/s41591-020- |
| | QAEDEADYYCQSYDSRLSGFVVFGGG | | | | | | | | | 0998-x) |
| | TKLTVL | | | | | | | | | |
| CoV2- | SYELTQPPSVSVSPGQTARITCSGDALP | IGHV3-7 | IGHJ4 | IGLV3-25 | IGLJ2 | 2663 | ARVNDGRPN | 3865 | QSADSSGT | Seth Zost et al., 2020 |
| 2794 | KQYAYWYHQKPGQAPVLVIYKDSERP | (Human) | (Human) | (Human) | (Human) | | PLEYYFDY | | SVL | (https://www.nature.co |
| | SGIPERFSGSSSGTTVTLTISGVQAEDE | | | | | | | | | m/articles/s41591-020- |
| | ADYYCQSADSSGTSVLFGGGTKLTVL | | | | | | | | | 0998-x) |
| CoV2- | QSALTQPASVSGSPGQSITISCTGTSSD | IGHV4-31 | IGHJ4 | IGLV2-23 | IGLJ3 | 2664 | ARETYSAYEM | 3866 | CSYARSS | Seth Zost et al., 2020 |
| 2796 | VGSYNLVSWYQQHPGKAPKLMIYEGS | (Human) | (Human) | (Human) | (Human) | | PPYFDY | | TRV | (https://www.nature.co |
| | KRPSGVSNRFSGSKSGNTASLTISGLQ | | | | | | | | | m/articles/s41591-020- |
| | AEDEADYYCCSYARSSTRVFGGGTKLT | | | | | | | | | 0998-x) |
| | VL | | | | | | | | | |
| CoV2- | SYELTQPPSVSVSPGQTARITCSGDAFP | IGHV5-51 | IGHJ6 | IGLV3-25 | IGLJ1 | 2665 | ARDLIIESTI | 3867 | QSADSRG | Seth Zost et al., 2020 |
| 2797 | KQYGYWYQQKPGQAPVLVIYKDSERP | (Human) | (Human) | (Human) | (Human) | | AARPGYYGM | | AV | (https://www.nature.co |
| | SGIPERFSGSSSGTTVTLTISGVQAEDE | | | | | | DV | | | m/articles/s41591-020- |
| | ADYYCQSADSRGAVFGSGTKVTVL | | | | | | | | | 0998-x) |
| CoV2- | QSVLTQPPSASGTPGQSVTISCSGSSS | IGHV1-46 | IGHJ4 | IGLV1-44 | IGLJ1 | 2666 | ARERSGTYFF | 3868 | AVWDDSL | Seth Zost et al., 2020 |
| 2801 | NIGNNKVNWYQQLPGTAPKVLIYNSN | (Human) | (Human) | (Human) | (Human) | | DY | | HSYV | (https://www.nature.co |
| | QRPSGVPDRFSGSKSGTSASLAISGLQ | | | | | | | | | m/articles/s41591-020- |
| | SEDEADYYCAVWDDSLHSYVFGTETK | | | | | | | | | 0998-x) |
| | VTVL | | | | | | | | | |
| CoV2- | DIQMTQSPSSLSASVGDRVTITCRASQ | IGHV2-70 | IGHJ4 | IGKV1-39 | IGKJ1 | 2667 | ARETPVTAID | 3869 | QQSYSTPR | Seth Zost et al., 2020 |
| 2807 | SISRYLNWYQQKPGKAPKLLIYTASSLQ | (Human) | (Human) | (Human) | (Human) | | Y | | T | (https://www.nature.co |
| | SGVPSRFSGSGSGTDFTLTISSLQPEDF | | | | | | | | | m/articles/s41591-020- |
| | ATYYCQQSYSTPRTFGQGTKVEIK | | | | | | | | | 0998-x) |

| | | | | | Not | | | | | |
|---|---|---|---|---|---|---|---|---|---|---|
| | Ab | | | Neutral- | Neutral- | | | SEQ | | SEQ |
| | or | | Doesn't | ising | ising | Protein + | | ID | | ID |
| Name | Nb | Binds to | Bind to | Vs | Vs | Epitope | Origin | NO.: | VH or VHH | NO.: |
| CoV2- | Ab | SARS-CoV1, | | | SARS-CoV2 | S; RBD | B-cells; SARS-CoV2 | 580 | QVQLVQSGAEVKKPGSSVKVSCKASGFT | 1659 |
| 2808 | | SARS-CoV2 | | | | | Human Patient | | FMSSAVQWVRQARGQRLEWIGWIVIG | |
| | | | | | | | | | SGNTNYAQKFQERVTITRDMSTSTAYM | |
| | | | | | | | | | ELSSLRSEDTAVYYCAAPYCSSISCNDGF | |
| | | | | | | | | | DIWGQGTMVTVSS | |
| CoV2- | Ab | SARS-CoV2 | SARS- | | SARS-CoV1, | S; RBD | B-cells; SARS-CoV2 | 581 | QVQLVQSGAEVKKPGASVKVSCKVSGY | 1660 |
| 2809 | | | CoV1 | | SARS-CoV2 | | Human Patient | | TFTGYVVHWVRQAPGQDLEWMGWIN | |
| | | | | | | | | | TGYGNTKYSQKFQGRVTISWDTSATTAY | |
| | | | | | | | | | MELSNLKSEDKAVYYCASMTRMSEQTY | |
| | | | | | | | | | YGMDVWGQGTTVTVSS | |
| CoV2- | Ab | SARS-CoV1, | | | SARS-CoV2 | S; non- | B-cells; SARS-CoV2 | 582 | QVQLVESGGGVVQPGRSLRLSCAASGF | 1661 |
| 2811 | | SARS-CoV2 | | | | RBD | Human Patient | | TFSSFAMHWVRQAPGKGLEWVAVISY | |
| | | | | | | | | | DGSNKYYADSVKGRFTISRDNSKNTLYL | |
| | | | | | | | | | QMNSLRAEDTAAYYCARELMSVGWGQ | |
| | | | | | | | | | GTLVTVSS | |
| CoV2- | Ab | SARS-CoV2 | SARS- | SARS-CoV2 | | S; RBD | B-cells; SARS-CoV2 | 583 | EVQLVESGGGLIQPGGSLRLSCAASGITV | 1662 |
| 2812 | | | CoV1 | | | | Human Patient | | SSNYMSWVRQAPGKGLEWVSVIYAGG | |
| | | | | | | | | | STYYADSVKGRFTISRDNSKNTLYLQMN | |
| | | | | | | | | | SLRAEDTAVYYCARDALYYNGPGRDGM | |
| | | | | | | | | | DVWGQGTTVTVSS | |
| CoV2- | Ab | SARS-CoV2 | SARS- | SARS-CoV2 | | S; RBD | B-cells; SARS-CoV2 | 584 | EVQLVESGGGLIQPGGSLRLSCAASGITV | 1663 |
| 2813 | | | CoV1 | | | | Human Patient | | SSNYMSWVRQAPGKGLEWVSVIYAGG | |
| | | | | | | | | | STYYADSVKGRFTISRDNSKNTLYLQMN | |
| | | | | | | | | | SLRAEDTAVYYCARDALYYNGPGRDGM | |
| | | | | | | | | | DVWGQGTTVTVSS | |
| CoV2- | Ab | SARS-CoV1, | | | SARS-CoV2 | S; non- | B-cells; SARS-CoV2 | 585 | QVQLVESGGGVVQPGRSLRLSCAASGF | 1664 |
| 2814 | | SARS-CoV2 | | | | RBC | Human Patient | | TFSSYGMHWVRQAPGKGLEWVAVISS | |
| | | | | | | | | | DGSNKYYAGSVKGRFTISRDNSKNTLYL | |
| | | | | | | | | | QMNSLRAEDTAVYYCAKDMVEPLFSHY | |
| | | | | | | | | | YYYGMDVWGQGTTVTVSS | |
| CoV2- | Ab | SARS-CoV2 | SARS- | | SARS-CoV1, | S; NTD | B-cells; SARS-CoV2 | 586 | QVQLQESGPGLVKPSETLSLTCTVSGGSI | 1665 |
| 2816 | | | CoV1 | | SARS-CoV2 | | Human Patient | | SSYYWSWIRQPPGKGLEWIGYIYYSGST | |
| | | | | | | | | | NYNPSLKSRVTISVDMSKNQFSLKLRSVT | |
| | | | | | | | | | AADTAVYYCARAPRERLQWGEYYFDYW | |
| | | | | | | | | | GQGTLVTVSS | |
| CoV2- | Ab | SARS-CoV1, | | | SARS-CoV2 | S; RBD | B-cells; SARS-CoV2 | 587 | EVQLVESGGGLVQPGGSLRLSCAASGFT | 1666 |
| 2817 | | SARS-CoV2 | | | | | Human Patient | | FRSYDMHWVRQVTGKGLEWVSTIGTA | |
| | | | | | | | | | GDTYYPGSVKGRFTISRENAKNSLYLQM | |
| | | | | | | | | | NSLRAGDTAVYYCARVFETKVIRGGRYY | |
| | | | | | | | | | YYYYMDVWGKGTTVTVSS | |
| CoV2- | Ab | SARS-CoV2 | SARS- | | SARS-CoV1, | S; non- | B-cells; SARS-CoV2 | 588 | QVQLQQWGAGLLKPSETLSLTCAVYGG | 1667 |
| 2818 | | | CoV1 | | SARS-CoV2 | RBD | Human Patient | | SFSGYYWSWIRQPPGKGLEWIGEINHS | |
| | | | | | | | | | GSTNYNPSLKSRVTISVDTSKNHFSLKM | |
| | | | | | | | | | NSVTAADTAVYYCARCRQMGNFYYYYN | |
| | | | | | | | | | DVWGKGTTVTVSS | |
| CoV2- | Ab | SARS-CoV2 | SARS- | SARS-CoV2 | | S; RBD | B-cells; SARS-CoV2 | 589 | QVQLQESGPGLVKPSQTLSLTCTVSGDSI | 1668 |
| 2819 | | | CoV1 | | | | Human Patient | | SSAGYYWSWIRQHPGKGLEWIGYIYYSG | |
| | | | | | | | | | RTYYNPSLKSRVTMSVDTSKNQFSLRLRS | |
| | | | | | | | | | VTAADTAVYYCARVVPTRGPVAWFDP | |
| | | | | | | | | | WGQGTLVTVSS | |
| CoV2- | Ab | SARS-CoV1, | | | SARS-CoV2 | S; non- | B-cells; SARS-CoV2 | 590 | QVQLVESGGGVVQPGRSLRLSCAASGF | 1669 |
| 2820 | | SARS-CoV2 | | | | RBD | Human Patient | | TFSSYGMHWVRQAPGKGLEWVAVIWY | |
| | | | | | | | | | DGSKKDYADSVKGRFTISRDNSKNTLYL | |
| | | | | | | | | | QMNSLRAEDTAVYYCARDQSQGAYILT | |
| | | | | | | | | | GYRGYGMDVWGQGTTVTVSS | |
| CoV2- | Ab | SARS-CoV1, | | | SARS-CoV2 | S; RBD | B-cells; SARS-CoV2 | 591 | QVQLVQSGAEVKKPGSSVKVSCKTAGG | 1670 |
| 2821 | | SARS-CoV2 | | | | | Human Patient | | TSSSYAISWVRQAPGQGLEWMGRIIPIL | |
| | | | | | | | | | GVAIYAQKFQGRVTITADKSTSTAYMEL | |
| | | | | | | | | | NSLRSEDTAVYYCTTTQGGDYGDNLYYL | |
| | | | | | | | | | DYWGQGTLVTVSS | |
| CoV2- | Ab | SARS-CoV2 | SARS- | | SARS-CoV1, | S; RBD | B-cells; SARS-CoV2 | 592 | EVQLVESGGGLVQPGGSLRLSCAASGVT | 1671 |
| 2822 | | | CoV1 | | SARS-CoV2 | | Human Patient | | VSSNYMSWVRQAPGKGLEWVSLIYSGG | |
| | | | | | | | | | STFYADSVKGRFTISRHNSKNTLYLQMN | |
| | | | | | | | | | SLRPEDTAVYYCARGPEPDAFDIWGQG | |
| | | | | | | | | | TMVTVSS | |
| CoV2- | Ab | SARS-CoV2 | SARS- | | SARS-CoV1, | S; RBD | B-cells; SARS-CoV2 | 593 | QVQLVQSGAEVKKPGASVKVSCKASGD | 1672 |
| 2826 | | | CoV1 | | SARS-CoV2 | | Human Patient | | TFTTYYIHWVRQAPGQGLEWMGIINPS | |
| | | | | | | | | | GGSRSYAQKFQGRISMTSDTSTSTVYME | |
| | | | | | | | | | LSSLRSEDTAVYYCARGYGFVPNVLYYFD | |
| | | | | | | | | | YWGQGTLVTVST | |

| | | | | | | SEQ | | SEQ | | |
|---|---|---|---|---|---|---|---|---|---|---|
| | | Heavy V | Heavy J | Light V | Light J | ID | | ID | | |
| Name | VL | Gene | Gene | Gene | Gene | NO.: | CDRH3 | NO.: | CDRL3 | Sources |
| CoV2- | DIQMTQSPSSLSASVGDRVTITCRASQ | IGHV1-58 | IGHJ3 | IGKV1-33 | IGKJ3 | 2668 | AAPYCSSISCN | 3870 | QQYDNLPL | Seth Zost et al., 2020 |
| 2808 | SISNYLNWYQQKPGKAPKLLIYDASNL | (Human) | (Human) | (Human) | (Human) | | DGFDI | | A | (https://www.nature.co |
| | ETGVPSRFSGSGSGTDFTFTISSLQPDD | | | | | | | | | m/articles/s41591-020- |
| | IATYYCQQYDNLPLAFGPGTKVDIK | | | | | | | | | 0998-x) |
| CoV2- | DIQMTQSPSSLSASVGDRVTITCRASQ | IGHV1-3 | IGHJ6 | IGKV1-39 | IGKJ4 | 2669 | ASMTRMSEQ | 3871 | QQSYTTLL | Seth Zost et al., 2020 |
| 2809 | SISNYLNWYQQKPGKAPKLLIYAASSL | (Human) | (Human) | (Human) | (Human) | | TYYGMDV | | T | (https://www.nature.co |
| | QSGVPSRFSGSGSGTDFSLTISSLQPED | | | | | | | | | m/articles/s41591-020- |
| | FATYSCQQSYTTLLTFGGGTKVEIK | | | | | | | | | 0998-x) |
| CoV2- | QSVLTQPPSVSGAPGQRVTISCTGSSS | IGHV3-30 | IGHJ4 | IGLV1-40 | IGLJ3 | 2670 | ARELMSVG | 3872 | QSYDSSLS | Seth Zost et al., 2020 |
| 2811 | NIGARYDVHWYQQLPGTAPKLLMYG | (Human) | (Human) | (Human) | (Human) | | | | GWV | (https://www.nature.co |
| | NNNRPSGVPDRFSGSKSGTSVSLAITG | | | | | | | | | m/articles/s41591-020- |
| | LQAEDEADYYCQSYDSSLSGWVFGGG | | | | | | | | | 0998-x) |
| | TKLTVL | | | | | | | | | |
| CoV2- | VIQMTQSPSSLSASVGDRVTITCQASQ | IGHV3-53 | IGHJ6 | IGKV1-33 | IGKJ3 | 2671 | ARDALYYNGP | 3873 | QQYANLPF | Seth Zost et al., 2020 |
| 2812 | DINKYLNWYQQKPGKAPKLLIYDASNL | (Human) | (Human) | (Human) | (Human) | | GRDGMDV | | T | (https://www.nature.co |
| | ETGVPSRFSGSGSGTDFTFTISSLQPED | | | | | | | | | m/articles/s41591-020- |
| | IATYYCQQYANLPFTFGPGTKVDIK | | | | | | | | | 0998-x) |
| CoV2- | VIQMTQSPSSLSASVGDRVTITCQASQ | IGHV3-53 | IGHJ6 | IGKV1-33 | IGKJ2 | 2672 | ARDALYYNGP | 3874 | QQYDNLP | Seth Zost et al., 2020 |
| 2813 | DINKYLNWYQQKPGKAPKLLIYDASNL | (Human) | (Human) | (Human) | (Human) | | GRDGMDV | | RT | (https://www.nature.co |
| | ETGVPSRFSGSGSGTDFTFTISSLQPED | | | | | | | | | m/articles/s41591-020- |
| | IATYYCQQYDNLPRTFGQGTKLEIK | | | | | | | | | 0998-x) |
| CoV2- | QSVLTQPPSVSGAPGQRVTISCTGSSS | IGHV3-30 | IGHJ6 | IGLV1-40 | IGLJ1 | 2673 | AKDMVEPLFS | 3875 | QSYDSSLS | Seth Zost et al., 2020 |
| 2814 | NIGAGYDVHWYQQLPGTAPKLLIYGN | (Human) | (Human) | (Human) | (Human) | | HYYYYGMDV | | GYV | (https://www.nature.co |
| | SNRPSGVPDRFSGSKSGTSASLAISGL | | | | | | | | | m/articles/s41591-020- |
| | QAEDEADYSCQSYDSSLSGYVFGTGTK | | | | | | | | | 0998-x) |
| | VTVL | | | | | | | | | |
| CoV2- | QSALTQPASVSGSPGQSITISCTGTSSD | IGHV4-59 | IGHJ4 | IGLV2-23 | IGLJ2 | 2674 | ARAPRERLQ | 3876 | CSYAVST | Seth Zost et al., 2020 |
| 2816 | VGSYNLVSWYQQHAGKAPKLMIYEVI | (Human) | (Human) | (Human) | (Human) | | WGEYYFDY | | TYVI | (https://www.nature.co |
| | KRPSGVSNRFSGSKSGNTASLTISGLQ | | | | | | | | | m/articles/s41591-020- |
| | AEDEADYYCCSYAVSTTYVIFGGGTKLT | | | | | | | | | 0998-x) |
| | VL | | | | | | | | | |
| CoV2- | DIQMTQSPSSLSASVGDRVTITCRASQ | IGHV3-13 | IGHJ6 | IGKV1-39 | IGKJ2 | 2675 | ARVFETKVIR | 3877 | QQSYSNPS | Seth Zost et al., 2020 |
| 2817 | SISSYLNWYQQKPGKAPKLLIYAASSLQ | (Human) | (Human) | (Human) | (Human) | | GGRYYYYYYM | | YT | (https://www.nature.co |
| | SGVPSRFSGSGSGTDFTLTISSLQPEDF | | | | | | DV | | | m/articles/s41591-020- |
| | ATYYCQQSYSNPSYTFGQGTKLEIK | | | | | | | | | 0998-x) |
| CoV2- | EIVLTQSPGTLSLSPGERATLSCRASQS | IGHV4-34 | IGHJ6 | IGKV3-20 | IGKJ2 | 2676 | ARCRQMGNF | 3878 | QQYGSSPP | Seth Zost et al., 2020 |
| 2818 | VASSYLAWYQQKPGQAPRLLIYGASG | (Human) | (Human) | (Human) | (Human) | | YYYYMDV | | RYT | (https://www.nature.co |
| | RATGIPDRFSGSGSGTDFTLTISRLEPE | | | | | | | | | m/articles/s41591-020- |
| | DFAVYYCQQYGSSPPRYTFGQGTKLEI | | | | | | | | | 0998-x) |
| | K | | | | | | | | | |
| CoV2- | DIQMTQSPSSLSASVGDRVTITCRASQ | IGHV4-31 | IGHJ5 | IGKV1-39 | IGKJ2 | 2677 | ARVVPTRGPV | 3879 | QQSYSTLL | Seth Zost et al., 2020 |
| 2819 | SISSYLNWYQQRPGKAPKLLIYAASSLQ | (Human) | (Human) | (Human) | (Human) | | AWFDP | | YT | (https://www.nature.co |
| | SGVPSRFSGSGSGTDFTLTISTLQPEDF | | | | | | | | | m/articles/s41591-020- |
| | ATYYCQQSYSTLLYTFGQGTKLEIK | | | | | | | | | 0998-x) |
| CoV2- | DIVMITQSPLSLPVTPGEPASISCRSSQS | IGHV3-33 | IGHJ6 | IGKV2-28 | IGKJ3 | 2678 | ARDQSQGAYI | 3880 | MQALQTP | Seth Zost et al., 2020 |
| 2820 | LLHSNGYNYLDWYLQKPGQSPQFLIYL | (Human) | (Human) | (Human) | (Human) | | LTGYRGYGM | | FT | (https://www.nature.co |
| | GSNRASGVPDRFSGSGSGTDFILKISR | | | | | | DV | | | m/articles/s41591-020- |
| | VEAEDVGVYYCMQALQTPFTFGPGTK | | | | | | | | | 0998-x) |
| | VDIK | | | | | | | | | |
| CoV2- | SYVLTQPPSVSVAPGKTASITCEGNNI | IGHV1-69 | IGHJ4 | IGLV3-21 | IGLJ1 | 2679 | TTTQGGDYG | 3881 | QVWDSSS | Seth Zost et al., 2020 |
| 2821 | GSKSVHWYQQKPGQAPVLVIYYDSDR | (Human) | (Human) | (Human) | (Human) | | DNLYYLDY | | DRLYV | (https://www.nature.co |
| | PSGIPERFSGSNSGNTATLTISRVEAGD | | | | | | | | | m/articles/s41591-020- |
| | EADYYCQVWDSSSDRLYVFGTGTKVT | | | | | | | | | 0998-x) |
| | VL | | | | | | | | | |
| CoV2- | DIQLTQSPSFLSASVGDRVTITCRASQG | IGHV3-53 | IGHJ3 | IGKV1-9 | IGKJ2 | 2680 | ARGPEPDAFD | 3882 | QQSYSNPS | Seth Zost et al., 2020 |
| 2822 | ISSYLAWYQQKPGKAPKLLIYAASTLQS | (Human) | (Human) | (Human) | (Human) | | I | | YT | (https://www.nature.co |
| | GVPSRFSGSGSGTDFTLTISSLQPEDFA | | | | | | | | | m/articles/s41591-020- |
| | TYYCQQSYSNPSYTFGQGTKLEIK | | | | | | | | | 0998-x) |
| CoV2- | QSALTQPASVSGSPGQSITISCTGTSSD | IGHV1-46 | IGHJ4 | IGLV2-23 | IGLJ3 | 2681 | ARGYGFVPN | 3883 | CSYAGSST | Seth Zost et al., 2020 |
| 2826 | VGSYNLVSWYQQHPGKAPKLMIYEGS | (Human) | (Human) | (Human) | (Human) | | VLYYFDY | | WL | (https://www.nature.co |
| | KRPSGVSNRFSGSKSGITASLTISGLQA | | | | | | | | | m/articles/s41591-020- |
| | EDEADYYCCSYAGSSTWLFGGGTKLTV | | | | | | | | | 0998-x) |
| | L | | | | | | | | | |

| | | | | | Not | | | | | |
|---|---|---|---|---|---|---|---|---|---|---|
| | Ab | | | Neutral- | Neutral- | | | SEQ | | SEQ |
| | or | | Doesn't | ising | ising | Protein + | | ID | | ID |
| Name | Nb | Binds to | Bind to | Vs | Vs | Epitope | Origin | NO.: | VH or VHH | NO.: |
| CoV2- | Ab | SARS-CoV1, | | SARS-CoV2 | | S; RBD | B-cells; SARS-CoV2 | 594 | EVQLVESGGGLVKPGGSLRLSCAASGFT | 1673 |
| 2828 | | SARS-CoV2 | | | | | Human Patient | | FRDYSMNWVRQAPGKGLEWVSSISSG | |
| | | | | | | | | | GSYIYYADSVKGRFTISRDNAKNSLYLQM | |
| | | | | | | | | | NSLRAEDTAVYYCARGGSILWWLIDYW | |
| | | | | | | | | | GQGTLVTVSS | |
| CoV2- | Ab | SARS-CoV2 | SARS- | | SARS-CoV1, | S; NTD | B-cells; SARS-CoV2 | 595 | EVQLLESGGGLVQPGGSLRLSCAASGFT | 1674 |
| 2830 | | | CoV1 | | SARS-CoV2 | | Human Patient | | FTSYAMSWVRQAPGKGLEWVSGISISG | |
| | | | | | | | | | GSTYYAASVKGRFTISRDNSKNTLYLQM | |
| | | | | | | | | | NSLRAEDTAVYYCAKDSRSGIAGVDAFD | |
| | | | | | | | | | IWGQGTMVTVSS | |
| CoV2- | Ab | SARS-CoV2 | SARS- | SARS-CoV2 | | S; RBD | B-cells; SARS-CoV2 | 596 | EVQLVESGGGLVQPGGSLRLSCAASGLT | 1675 |
| 2832 | | | CoV1 | | | | Human Patient | | VSSNYMSWVRQAPGKGLECVSVIYAGG | |
| | | | | | | | | | NTYYADSVKGRFTISRDNSKNTLYLQMN | |
| | | | | | | | | | SLRAEDTAVYYCARGDGGYYSPFDYWG | |
| | | | | | | | | | QGTLVTVSS | |
| CoV2- | Ab | SARS-CoV1, | | | SARS-CoV2 | S; RBD | B-cells; SARS-CoV2 | 597 | QITLKESGPTLVKPTQTLTLTCTFSGFSLS | 1676 |
| 2834 | | SARS-CoV2 | | | | | Human Patient | | TSGVGVAWIRQPPGKALEWLALIYWDD | |
| | | | | | | | | | DKRYSPSLKSRLTITKDTSKNQVVLTMTN | |
| | | | | | | | | | MDPVDTATYYCAHRLPTPQLLPSFENW | |
| | | | | | | | | | FDPWGQGTLVTVSS | |
| CoV2- | Ab | SARS-CoV2 | SARS- | SARS-CoV2 | | S; RBD | B-cells; SARS-CoV2 | 598 | EVQLVESGGGLVQPGGSLRLSCAASGLT | 1677 |
| 2835 | | | CoV1 | | | | Human Patient | | VGSNYMNWVRQAPGKGLEWVSVIYSG | |
| | | | | | | | | | GSTFYADSVKGRFTISRDNSKNTLYLQLN | |
| | | | | | | | | | SLRAEDTAVYYCAREVVGYFDCWGQGT | |
| | | | | | | | | | LVTVSS | |
| CoV2- | Ab | SARS-CoV2 | SARS- | SARS-CoV2 | | S; RBD | B-cells; SARS-CoV2 | 599 | QVQLQESGPGLVKPSETLSLTCTVSGGSI | 1678 |
| 2841 | | | CoV1 | | | | Human Patient | | SSYYWSWIRQPPGKGLEWIGHIYYTGSS | |
| | | | | | | | | | YYNPSLKSRVTISLDTSKNQFSLKLNSVTA | |
| | | | | | | | | | ADTAVYYCARLRWLRGGIDFWGQGTLV | |
| | | | | | | | | | IVSS | |
| CoV2- | Ab | SARS-CoV1, | | | SARS-CoV2 | S; RBD | B-cells; SARS-CoV2 | 600 | QVQLVQSGAEVKKPGASVKVSCKASGD | 1679 |
| 2842 | | SARS-CoV2 | | | | | Human Patient | | TFTTYYIHWVRQAPGQGLEWMGIINPS | |
| | | | | | | | | | GGSRSYAQKFQGRISMTSDTSTSTVYME | |
| | | | | | | | | | LSSLRSEDTAVYYCARGYGFVPNVLYYFD | |
| | | | | | | | | | YWGQGILVTVSS | |
| CoV2- | Ab | SARS-CoV1, | | | SARS-CoV2 | S; non- | B-cells; SARS-CoV2 | 601 | QVELVESGGGVVQPGRSLRLSCAASGFI | 1680 |
| 2844 | | SARS-CoV2 | | | | RBD | Human Patient | | FSSYAMHWVRQAPGKGLEWVAVISYD | |
| | | | | | | | | | GGNKYYADSVKGRFTISRDNSKNTLYLQ | |
| | | | | | | | | | MNSLRAEDTAVYYCARAQGGNYYYGM | |
| | | | | | | | | | DVWGQGTTVTVSS | |
| CoV2- | Ab | SARS-CoV1, | | SARS-CoV2 | | S; RBD | B-cells; SARS-CoV2 | 602 | QVQLVESGGGVVQPGRSLRLSCAASGF | 1681 |
| 2848 | | SARS-CoV2 | | (weak) | | | Human Patient | | TFSRYAMYWVRQAPGKGLEWVALISYD | |
| | | | | | | | | | GRNEYYADSVKGRFTISRDNSKNTLYLQ | |
| | | | | | | | | | MNSLRAGDSAVYYCARDLAYHPYRDYG | |
| | | | | | | | | | DDDYYYYYGMDVWGQGTTVTVSS | |
| CoV2- | Ab | SARS-CoV2 | SARS- | | SARS-CoV1, | S; RBD | B-cells; SARS-CoV2 | 603 | QVQLVQSGAEVKKPGASVKVSCKASGY | 1682 |
| 2853 | | | CoV1 | | SARS-CoV2 | | Human Patient | | TFTSYYMHWVRQAPGQGLEWMGIINP | |
| | | | | | | | | | GGGSTTYAQKFQGRVTMTSDTSTSTVY | |
| | | | | | | | | | MELSSLRSEDTAMYYCARGAIPPNSRAE | |
| | | | | | | | | | IDYWGQGTLVTVSS | |
| CoV2- | Ab | SARS-CoV1, | | | SARS-CoV2 | S; RBD | B-cells; SARS-CoV2 | 604 | QVQLVQSGAEVKKPGASVKVSCKASGY | 1683 |
| 2863 | | SARS-CoV2 | | | | | Human Patient | | TFTSYYLHWVRQAPGQGLEWMGIINPS | |
| | | | | | | | | | GGSTTYAQKFQGRVTMTRDTSTSAVYM | |
| | | | | | | | | | ELRSLRSEDTAVYYCARENDYGDYVEPR | |
| | | | | | | | | | DYYYGMDVWGQGTTVTVSS | |
| CoV2- | Ab | SARS-CoV2 | SARS- | | SARS-CoV1, | S; non- | B-cells; SARS-CoV2 | 605 | QVQLVESGGGVVQPGRSLRLSCAASGF | 1684 |
| 2872 | | | CoV1 | | SARS-CoV2 | RBD | Human Patient | | TFSTYGMHWVRQAPGKGLEWVAVIWY | |
| | | | | | | | | | DGNKKYCADSVKGRCTISRDNSKNTLYL | |
| | | | | | | | | | QMNSLRAEDTAVYYCAREGPFGDREAS | |
| | | | | | | | | | GAFDVWGQGTMVTVSS | |
| CoV2- | Ab | SARS-CoV1, | | | SARS-CoV2 | S; RBD | B-cells; SARS-CoV2 | 606 | QVQLVESGGGLVKPGGSLRLSCAASGFT | 1685 |
| 2873 | | SARS-CoV2 | | | | | Human Patient | | FSDYYMSWIRQAPGKGLEWVSYISSSGI | |
| | | | | | | | | | TIYYADSVKGRFTISRDNAKNSLYLQMNS | |
| | | | | | | | | | LRAEDTAVYYCTGVVAAPAEYFQHWGQ | |
| | | | | | | | | | GTLVTVSS | |
| CoV2- | Ab | SARS-CoV1, | | SARS-CoV2 | | S; RBD | B-cells; SARS-CoV2 | 607 | EVQLVESGGGLVQPGGSLRLSCAASGFT | 1686 |
| 2878 | | SARS-CoV2 | | (weak) | | | Human Patient | | FSRHWMTWVRQAPGKGLEWVANIKQ | |
| | | | | | | | | | DGSEKYYVDSVKGRLTISRDNAKNSLYL | |
| | | | | | | | | | QMNSLRAEDTAVYYCARLGFYYGGADY | |
| | | | | | | | | | WGQGTLVTVSS | |

| | | | | | | SEQ | | SEQ | | |
|---|---|---|---|---|---|---|---|---|---|---|
| | | Heavy V | Heavy J | Light V | Light J | ID | | ID | | |
| Name | VL | Gene | Gene | Gene | Gene | NO.: | CDRH3 | NO.: | CDRL3 | Sources |
| CoV2- | NFMLTQPHSVSESPGKTVTISCTGSSG | IGHV3-21 | IGHJ4 | IGLV6-57 | IGLJ2 | 2682 | ARGGSILWW | 3884 | QSYDSTSR | Seth Zost et al., 2020 |
| 2828 | SIASNYVQWYQQRPGSAPTTVIYEDN | (Human) | (Human) | (Human) | (Human) | | LIDY | | VV | (https://www.nature.co |
| | QRPSGVPDRFSGSIDSSSNSASLTISGL | | | | | | | | | m/articles/s41591-020- |
| | KTEDEADYYCQSYDSTSRVVFGGGTKL | | | | | | | | | 0998-x) |
| | TVL | | | | | | | | | |
| CoV2- | SYVLTQPPSVSVAPGRTARITCGGNNI | IGHV3-23 | IGHJ3 | IGLV3-21 | IGLJ2 | 2683 | AKDSRSGIAG | 3885 | QVWDSGS | Seth Zost et al., 2020 |
| 2830 | GSKSVHWYQQKPGQAPVLVVYDDSD | (Human) | (Human) | (Human) | (Human) | | VDAFDI | | DHVV | (https://www.nature.co |
| | RPSGIPERFSGSKFGNTATLIISRVEAG | | | | | | | | | m/articles/s41591-020- |
| | DEADYSCQVWDSGSDHVVFGGGTKV | | | | | | | | | 0998-x) |
| | TVL | | | | | | | | | |
| CoV2- | DIQMTQSPSSLSASVGDRVTITCRASQ | IGHV3-66 | IGHJ4 | IGKV1-39 | IGKJ1 | 2684 | ARGDGGYYS | 3886 | QQSYSTPQ | Seth Zost et al., 2020 |
| 2832 | SISSYLNWYQQKPGKAPKVLIYAASTM | (Human) | (Human) | (Human) | (Human) | | PFDY | | T | (https://www.nature.co |
| | QSGVPSRFRGSGSGTDFTLTISSLQLED | | | | | | | | | m/articles/s41591-020- |
| | FATYYCQQSYSTPQTFGQGTKVEIK | | | | | | | | | 0998-x) |
| CoV2- | QSVLTQPPSVSEAPRQRVTISCSGGSS | IGHV2-5 | IGHJ5 | IGLV1-36 | IGLJ2 | 2685 | AHRLPTPQLL | 3887 | ASWDDSLI | Seth Zost et al., 2020 |
| 2834 | NIGNNAVNWYQQLPGKAPKLLIYYDD | (Human) | (Human) | (Human) | (Human) | | PSFENWFDP | | GPV | (https://www.nature.co |
| | LLPSGVSDRFSGSKSGTSASLAISGLQS | | | | | | | | | m/articles/s41591-020- |
| | EDEADYYCASWDDSLIGPVFGGGTKL | | | | | | | | | 0998-x) |
| | TVL | | | | | | | | | |
| CoV2- | DIQLTQSPSFLSASVGDRVTITCRASQG | IGHV3-66 | IGHJ4 | IGKV1-9 | IGKJ2 | 2686 | AREVVGYF | 3888 | QQLNSYPG | Seth Zost et al., 2020 |
| 2835 | ISTYLAWYQQKPGKAPKLLIYAASTLQS | (Human) | (Human) | (Human) | (Human) | | DC | | YT | (https://www.nature.co |
| | GVPSRFSGSGSGTEFTLTISSLQPEDFA | | | | | | | | | m/articles/s41591-020- |
| | TYYCQQLNSYPGYTFGQGTKLEIK | | | | | | | | | 0998-x) |
| CoV2- | NLMLTQPHSVSESPGKTVTISCTGSSG | IGHV4-59 | IGHJ4 | IGLV6-57 | IGLJ3 | 2687 | ARLRWLRG | 3889 | QSYDSNN | Seth Zost et al., 2020 |
| 2841 | SIASNYVQWYQQRPGSAPTTVIYEDN | (Human) | (Human) | (Human) | (Human) | | GIDF | | QV | (https://www.nature.co |
| | QRPSGVPDRFSGSIDSSSNSASLTISGL | | | | | | | | | m/articles/s41591-020- |
| | KTEDEADYYCQSYDSNNQVFGGGTKL | | | | | | | | | 0998-x) |
| | TVL | | | | | | | | | |
| CoV2- | NFMLTQPHSVSESPGKTVTISCTRSSG | IGHV1-46 | IGHJ4 | IGLV6-57 | IGLJ2 | 2688 | ARGYGFVPN | 3890 | QSYDSSDV | Seth Zost et al., 2020 |
| 2842 | SIASSYVQWYQQRPGSAPTTVIYEDN | (Human) | (Human) | (Human) | (Human) | | VLYYFDY | | V | (https://www.nature.co |
| | QRPSGVPDRFSGSIDSSSNSASLTISGL | | | | | | | | | m/articles/s41591-020- |
| | KTEDEADYYCQSYDSSDVVFGGGTKLT | | | | | | | | | 0998-x) |
| | VL | | | | | | | | | |
| CoV2- | SYVLTQPPSVSVAPGKTARITCGGNNI | IGHV3-30- | IGHJ6 | IGLV3-21 | IGLJ2 | 2689 | ARAQGGNYY | 3891 | QVWDSSS | Seth Zost et al., 2020 |
| 2844 | GSKNVHWYQQKPGQAPVKVVYHDG | 3 | (Human) | (Human) | (Human) | | YGMDV | | DHHVV | (https://www.nature.co |
| | DRPSGIPERFSGSNSGNTATLTINRVE | (Human) | | | | | | | | m/articles/s41591-020- |
| | AGDEADYSCQVWDSSSDHHVVFGGG | | | | | | | | | 0998-x) |
| | TKLTVL | | | | | | | | | |
| CoV2- | SYELTQPPSVSVSPGQTARITCFGDALP | IGHV3-30 | IGHJ6 | IGLV3-25 | IGLJ3 | 2690 | ARDLAYHPY | 3892 | QSADSSGT | Seth Zost et al., 2020 |
| 2848 | KQYAYWYQQKPGQGPVLVIYKDSERP | (Human) | (Human) | (Human) | (Human) | | RDYGDDDYY | | YRV | (https://www.nature.co |
| | SGIPERFSGSTSGTTVTLTISGVQAEDE | | | | | | YYYGMDV | | | m/articles/s41591-020- |
| | ADYYCQSADSSGTYRVFGGGTKLTVL | | | | | | | | | 0998-x) |
| CoV2- | EIVMTQSPATLSVSPGERVTLSCRASQ | IGHV1-46 | IGHJ4 | IGKV3-15 | IGKJ4 | 2691 | SRARGAIP | 3893 | QQYYNWP | Seth Zost et al., 2020 |
| 2853 | SVSSNLAWCQQKPGQAPRLLIYGAST | (Human) | (Human) | (Human) | (Human) | | PNAEIDY | | LT | (https://www.nature.co |
| | RATGIPARFSGSGSGTEFTLTISSLQSE | | | | | | | | | m/articles/s41591-020- |
| | DFAVYYCQQYYNWPLTFGGGTKVEIK | | | | | | | | | 0998-x) |
| CoV2- | SYELTQPPSVSVSPGQTARITCSGDALP | IGHV1-46 | IGHJ6 | IGLV3-25 | IGLJ2 | 2692 | ARENDYGDY | 3894 | QSADSSAA | Seth Zost et al., 2020 |
| 2863 | KQYAYWYQQKPGQAPVLVIYKDSERP | (Human) | (Human) | (Human) | (Human) | | VEPRDYYYG | | YVV | (https://www.nature.co |
| | SGIPERFSGSSSGTTVTLTISGVQAEDE | | | | | | MDV | | | m/articles/s41591-020- |
| | ADYYCQSADSSAAYVVFGGGTKLTVL | | | | | | | | | 0998-x) |
| CoV2- | SYELTQPPSVSVSPGQTARITCSGDALP | IGHV3-33 | IGHJ3 | IGLV3-10 | IGLJ3 | 2693 | AREGPFGD | 3895 | YSTDSSGK | Seth Zost et al., 2020 |
| 2872 | KKYTYWYQQKSGQAPVVVIYEDSKRP | (Human) | (Human) | (Human) | (Human) | | REASGAFDV | | GV | (https://www.nature.co |
| | SGIPERFSGSSSGTMATLTISGAQVED | | | | | | | | | m/articles/s41591-020- |
| | EADYYCYSTDSSGKGVFGGGTKLTVL | | | | | | | | | 0998-x) |
| CoV2- | SYVLTQPPSVSVAPGKTARITCGGNNI | IGHV3-11 | IGHJ1 | IGLV3-21 | IGLJ1 | 2694 | TGVVAAPA | 3896 | QVWDSSS | Seth Zost et al., 2020 |
| 2873 | GSKSVHWYQQKPGQAPVLVVYDDSD | (Human) | (Human) | (Human) | (Human) | | EYFQI | | DPFYV | (https://www.nature.co |
| | RPSGIPERFSGSNSGNTATLTISRVEAG | | | | | | | | | m/articles/s41591-020- |
| | DEADYYCQVWDSSSDPFYVFGTGTKV | | | | | | | | | 0998-x) |
| | TVL | | | | | | | | | |
| CoV2- | NFMLTQPHSVSESPGKTVTISCTGSSG | IGHV3-7 | IGHJ4 | IGLV6-57 | IGLJ3 | 2695 | ARLGFYYG | 3897 | QSYDGINR | Seth Zost et al., 2020 |
| 2878 | SIASNYVQWYQQRPGSAPTTVISEDN | (Human) | (Human) | (Human) | (Human) | | GADY | | AWV | (https://www.nature.co |
| | QRPSGVPDRFSGSIDSSSNSASLTISGL | | | | | | | | | m/articles/s41591-020- |
| | KTEDEADYYCQSYDGINRAWVFGGGT | | | | | | | | | 0998-x) |
| | KLTVL | | | | | | | | | |

| | | | | | Not | | | | | |
|---|---|---|---|---|---|---|---|---|---|---|
| | Ab | | | Neutral- | Neutral- | | | SEQ | | SEQ |
| | or | | Doesn't | ising | ising | Protein + | | ID | | ID |
| Name | Nb | Binds to | Bind to | Vs | Vs | Epitope | Origin | NO.: | VH or VHH | NO.: |
| CoV2- | Ab | SARS-CoV1, | | | SARS-CoV2 | S; non- | B-cells; SARS-CoV2 | 608 | QVQLVESGGGVVQPGRSLRLSCAASGF | 1687 |
| 2883 | | SARS-CoV2 | | | | RBD | Human Patient | | TFSTYGMHWVRQAPGKGLEWVAVISY | |
| | | | | | | | | | DGSNKYYADSVKGRFTISRDNSKNTLYL | |
| | | | | | | | | | QMNSLRAEDTAMYYCAKDGSIAAADY | |
| | | | | | | | | | WGQGTLVTVSS | |
| CoV2- | Ab | SARS-CoV2 | SARS- | | SARS-CoV1, | S; RBD | B-cells; SARS-CoV2 | 609 | QVQLVQAGAEVKKPGASVKVSCKASGY | 1688 |
| 2891 | | | CoV1 | | SARS-CoV2 | | Human Patient | | TFTSYYMHWVRQAPGQGLEWMGIINP | |
| | | | | | | | | | SGGSTSYAQKFQGRVTMTRDTSTSTVY | |
| | | | | | | | | | MELSSLRSEDTAVYYCARGAAVPAAGEF | |
| | | | | | | | | | DYWGQGTLVTVSS | |
| CoV2- | Ab | SARS-CoV1, | | | SARS-CoV2 | S; RBD | B-cells; SARS-CoV2 | 610 | QVQLVESGGGVVQSGGSLRLSCAASGF | 1689 |
| 2894 | | SARS-CoV2 | | | | | Human Patient | | TFSTYGMHWVRQAPGKGLEWVAIISYD | |
| | | | | | | | | | GINKYYADSVKGRFTISRDNSKNTVYLQ | |
| | | | | | | | | | MNSLRTEDTAMYYCAKGDGSYLMDYF | |
| | | | | | | | | | DYWGQGTLVTVSS | |
| CoV2- | Ab | SARS-CoV2 | SARS- | | SARS-CoV1, | S; RBD | B-cells; SARS-CoV2 | 611 | EVQLVESGGGLVQPGGSLRLSCAASGFT | 1690 |
| 2901 | | | CoV1 | | SARS-CoV2 | | Human Patient | | VSSNYMSWVRQAPGKGLEWVSVIYPG | |
| | | | | | | | | | GSAFYADSVKGRFTISRHNSNNTLCLQM | |
| | | | | | | | | | NSLRTEDTAVYYCARSYDILTGYRDAFDI | |
| | | | | | | | | | WGQGTMVTVSS | |
| CoV2- | Ab | SARS-CoV1, | | | SARS-CoV2 | S; non- | B-cells; SARS-CoV2 | 612 | QVQLQQWGAGLLKPSETLSLTCAVYGG | 1691 |
| 2904 | | SARS-CoV2 | | | | RBC | Human Patient | | SFSGYYWSWIRQPPGKGLEWIGEINHS | |
| | | | | | | | | | GSTNYNPSLKSRVTISVDTSKNHFSLKM | |
| | | | | | | | | | NSVTAADTAVYYCARCRQMGNFYYYYM | |
| | | | | | | | | | DVWGKGTTVTVSP | |
| CoV2- | Ab | SARS-CoV1, | | | SARS-CoV2 | S; RBD | B-cells; SARS-CoV2 | 513 | EVQLVQSGAEVKKPGESLKISCKGSGYSF | 1692 |
| 2906 | | SARS-CoV2 | | | | | Human Patient | | TSYWVGWVRQMPGKGLEWMGIIYPG | |
| | | | | | | | | | DSDTRDSPSFQGQVTISADKSISTAYLQ | |
| | | | | | | | | | WSSLKASDTAMYYCARLGSESKIDYYYY | |
| | | | | | | | | | GMDVWGQGTTVTVSS | |
| CoV2- | Ab | SARS-CoV2 | SARS- | | SARS-CoV1, | S; RBD | B-cells; SARS-CoV2 | 614 | QVQLVQSGAEVKKPGSSVKVSCKASGD | 1693 |
| 2909 | | | CoV1 | | SARS-CoV2 | | Human Patient | | TFSSYTINWVRQAPGQGLEWMGRIIPIL | |
| | | | | | | | | | GIPNYAQKFQGRVTITADKSTSTAFMEL | |
| | | | | | | | | | SSLRSEDTAVYYCARGRGYSNYGASYYM | |
| | | | | | | | | | DVWGKGTTVTVSS | |
| CoV2- | Ab | SARS-CoV2 | SARS- | | SARS-CoV1, | S; RBD | B-cells; SARS-CoV2 | 615 | QLQLRESGPGLVKPSETLSLTCTVSGGSI | 1694 |
| 2911 | | | CoV1 | | SARS-CoV2 | | Human Patient | | SSSSYYWGWIRQPPGKGLEWIGSIYYSG | |
| | | | | | | | | | STYYNPSLKSRVTISVDTSKNQFSLKLSSV | |
| | | | | | | | | | TAADTAVFYCARMSRGYNYAYTFDIWG | |
| | | | | | | | | | QGTMVTVSS | |
| CoV2- | Ab | SARS-CoV2 | SARS- | SARS-CoV2 | | S; RBD | B-cells; SARS-CoV2 | 616 | QVTLRESGPALVKPTQTLTLTCTFSGFSLS | 1695 |
| 2919 | | | CoV1 | | | | Human Patient | | TSGMCLSWIRQPPGKALEWLARIDWD | |
| | | | | | | | | | DDKYYSTSLETRLTISKDTSKNQVVLTMT | |
| | | | | | | | | | NMDPVDTGTYYCARTMATINAFDIWG | |
| | | | | | | | | | QGTMVTVSS | |
| CoV2- | Ab | SARS-CoV1, | | | SARS-CoV2 | S; non- | B-cells; SARS-CoV2 | 617 | QVQLVESGGGVVQPGRSLRLSCAASGF | 1696 |
| 2933 | | SARS-CoV2 | | | | RBD | Human Patient | | TFSYYPMHWLWVRQAPGKGLEWVAVT | |
| | | | | | | | | | SYDGTNKYYADSVKGRFTISRDNSKNTLY | |
| | | | | | | | | | LQMNSLRAEDTAVYYCARGGATNFDY | |
| | | | | | | | | | WGQGTLVTVSS | |
| CoV2- | Ab | SARS-CoV2 | SARS- | | SARS-CoV1, | S; non- | B-cells; SARS-CoV2 | 618 | QVQLVQSGSELKKPGASVKVSCKASEYT | 1697 |
| 2934 | | | CoV1 | | SARS-CoV2 | RBD | Human Patient | | FTSYAMNWVRQAPGQGLEWMGWINT | |
| | | | | | | | | | NTGNPTYAQGFTGRFVFSLDTSVSTAYL | |
| | | | | | | | | | QISSLKAEDTAVYYCARPGKAAAFDYWG | |
| | | | | | | | | | QGTLVTVSS | |
| CoV2- | Ab | SARS-CoV2 | SARS- | | SARS-CoV1, | S; RBD | B-cells; SARS-CoV2 | 619 | QVQLVESGGGVVQPGRSLRLSCAASGF | 1698 |
| 2939 | | | CoV1 | | SARS-CoV2 | | Human Patient | | TFSSYGMHWVRQAPGKGLEWVAVIWY | |
| | | | | | | | | | DGSNKYYAESVKGRFTISRDNSKNTLYLQ | |
| | | | | | | | | | MNSLRAEDTAVYYCARDLHQDWVVVV | |
| | | | | | | | | | AANVYGMDVWGQGTTVTVSS | |
| CoV2- | Ab | SARS-CoV2 | SARS- | SARS-CoV2 | | S; RBD | B-cells; SARS-CoV2 | 620 | QMQLVQSGPEVKKPGTSVKVSCKASGF | 1699 |
| 2941 | | | CoV1 | (weak) | | | Human Patient | | TFMSSAVQWVRQARGQRLEWIGWIVI | |
| | | | | | | | | | GSGNTNYAQKFQERVTITRDMSTSTAY | |
| | | | | | | | | | MELSSLRSEDTAVYYCAAPYCSSISCNDG | |
| | | | | | | | | | FDIWGQGTMVTVSS | |
| CoV2- | Ab | SARS-CoV2 | SARS- | | SARS-CoV1, | S; non- | B-cells; SARS-CoV2 | 621 | QVTLRESGPALVKPTQTLTLTCTFSGFSLS | 1700 |
| 2942 | | | CoV1 | | SARS-CoV2 | RBD | Human Patient | | TSGLCVSWIRQPPGKALEWLARIDWDD | |
| | | | | | | | | | DKYYNTSLRTRLTISKDTSKNQVVLTMTN | |
| | | | | | | | | | MDPVDTATYYCARATTFFYGMDVWGQ | |
| | | | | | | | | | GTTATVSS | |
| CoV2- | Ab | SARS-CoV1, | | | SARS-CoV2 | S; RBD | B-cells; SARS-CoV2 | 622 | QVQLVESGGGVVQPGRSLRLSCAASGF | 1701 |
| 2944 | | SARS-CoV2 | | | | | Human Patient | | TFRRYGMYWVRQAPGKGLEWVAVISY | |
| | | | | | | | | | DGTDKYYTDSVKGRFTISRDNSKNTLYLQ | |
| | | | | | | | | | MNSLRAEDTAVYYCAKKGGPYCGGGN | |
| | | | | | | | | | CYAGYFDYWGQGILVTVSS | |

| | | | | | | SEQ | | SEQ | | |
|---|---|---|---|---|---|---|---|---|---|---|
| | | Heavy V | Heavy J | Light V | Light J | ID | | ID | | |
| Name | VL | Gene | Gene | Gene | Gene | NO.: | CDRH3 | NO.: | CDRL3 | Sources |
| CoV2- | DIVMTQSPDSLAVSLGERATINCKSSQ | IGHV3-30 | IGHJ4 | IGKV4-1 | IGKJ1 | 2696 | AKDGSIAAAD | 3898 | QQYYSTP | Seth Zost et al., 2020 |
| 2883 | SVLHSSNNKDSLVWYQQKPGQPPKLL | (Human) | (Human) | (Human) | (Human) | | Y | | WT | (https://www.nature.co |
| | IYWASSRESGVPDRFSGSGSGTDFTLTI | | | | | | | | | m/articles/s41591-020- |
| | SSLQAEDVAVYYCQQYYSTPWTFGQG | | | | | | | | | 0998-x) |
| | TKVEIK | | | | | | | | | |
| CoV2- | DIQMTQSPSTLSASVGDRVTITCRASQ | IGHV1-46 | IGHJ4 | IGKV1-5 | IGKJ2 | 2697 | ARGAAVPAA | 3899 | QQYNSYSY | Seth Zost et al., 2020 |
| 2891 | SISSWLAWYQQKPGKAPKLLIYKASSL | (Human) | (Human) | (Human) | (Human) | | GEFDY | | T | (https://www.nature.co |
| | ESGVPSRFSGSGSGTEFTLTISSLQPDD | | | | | | | | | m/articles/s41591-020- |
| | FATYYCQQYNSYSYTFGQGTKLEIK | | | | | | | | | 0998-x) |
| CoV2- | EIVMTQSPATLSVSPGERATLSCRASQ | IGHV3-30 | IGHJ4 | IGKV3-15 | IGKJ4 | 2698 | AKGDGSYLM | 3900 | QQYDDWP | Seth Zost et al., 2020 |
| 2894 | SVSNNLAWYQQKPGQAPRLLIYGAST | (Human) | (Human) | (Human) | (Human) | | DYFDY | | PEVT | (https://www.nature.co |
| | RATGIPVRFSGSGSGTEFTLTISSLQSE | | | | | | | | | m/articles/s41591-020- |
| | DFAVYYCQQYDDWPPEVTFGG | | | | | | | | | 0998-x) |
| | GTKVEIK | | | | | | | | | |
| CoV2- | QSVLTQPPSVSGAPGQRVTISCTGSSS | IGHV3-53 | IGHJ3 | IGLV1-40 | IGLJ2 | 2699 | ARSYDILTGYR | 3901 | VAWDDSR | Seth Zost et al., 2020 |
| 2901 | NIGSGSDVHWYQQLPGTAPKLLIYGN | (Human) | (Human) | (Human) | (Human) | | DAFDI | | NGLV | (https://www.nature.co |
| | TNRPSGVPDRFSGSKSGTSASLAITGL | | | | | | | | | m/articles/s41591-020- |
| | QAEDEADYYCVAWDDSRNGLVFGGG | | | | | | | | | 0998-x) |
| | AKLTVL | | | | | | | | | |
| CoV2- | QSVLTQPPSVSGVPGQRVTVSCTGSSS | IGHV4-34 | IGHJ6 | IGLV1-40 | IGLJ2 | 2700 | ARCRQMGNF | 3902 | QSFDIGRG | Seth Zost et al., 2020 |
| 2904 | NIGAGFDVYWYQQFLGTAPKLLIYGN | (Human) | (Human) | (Human) | (Human) | | YYYYMDV | | GWI | (https://www.nature.co |
| | NNRPSGVPDRFSASKSGTSASLAITGL | | | | | | | | | m/articles/s41591-020- |
| | QAEDEADYYCQSFDIGRGGWIFGGGT | | | | | | | | | 0998-x) |
| | KLTVL | | | | | | | | | |
| CoV2- | DIQMTQSPSSLSASVGDRVTITCRPSQ | IGHV5-51 | IGHJ6 | IGKV1-39 | IGKJ5 | 2701 | ARLGSESKIDY | 3903 | QQSYSTPP | Seth Zost et al., 2020 |
| 2906 | SITTYLNWYQQKPGKAPRLLIYAVSSLQ | (Human) | (Human) | (Human) | (Human) | | YYYGMDV | | T | (https://www.nature.co |
| | SGVPSRFSGSGSGTDFTLTISSLQPEDF | | | | | | | | | m/articles/s41591-020- |
| | ATYYCQQSYSTPPTFGQGTRLEIK | | | | | | | | | 0998-x) |
| CoV2- | QSVLTQPPSVSGAPGQRVTISCTGSSS | IGHV1-69 | IGHJ6 | IGLV1-40 | IGLJ2 | 2702 | ARGRGYSNY | 3904 | QSYDSSLS | Seth Zost et al., 2020 |
| 2909 | NIGAGYDVHWYQQLPETAPKLLIYAN | (Human) | (Human) | (Human) | (Human) | | GASYYMDV | | GSV | (https://www.nature.co |
| | SNRPSGVPDRFSGSKSGTSASLAITGL | | | | | | | | | m/articles/s41591-020- |
| | QAEDEADYYCQSYDSSLSGSVFGGGT | | | | | | | | | 0998-x) |
| | KLTVL | | | | | | | | | |
| CoV2- | QSALTQPASVSGSPGQSITISCTGTSSD | IGHV4-39 | IGHJ3 | IGLV2-23 | IGLJ2 | 2703 | ARMSRGYNY | 3905 | CSYAGSVL | Seth Zost et al., 2020 |
| 2911 | VGSYNLVSWYQQHPGKAPKLKIYEGS | (Human) | (Human) | (Human) | (Human) | | AYTFDI | | | (https://www.nature.co |
| | KRPSGVSNRFSGSKSGNTASLTISGLQ | | | | | | | | | m/articles/s41591-020- |
| | AEDEADYYCCSYAGSVLFGGGTKLTVL | | | | | | | | | 0998-x) |
| CoV2- | DIQMTQSPSSLSASAGDRVTITCRASQ | IGHV2-70 | IGHJ3 | IGKV1-39 | IGKJ2 | 2704 | ARTMATINAF | 3906 | QQSFSTPR | Seth Zost et al., 2020 |
| 2919 | SIRYYLNWYQQKPGKAPKLLIYAASSL | (Human) | (Human) | (Human) | (Human) | | DI | | T | (https://www.nature.co |
| | QSGVPSRFSGSGSGTDFTLTISSLQPED | | | | | | | | | m/articles/s41591-020- |
| | FAAYYCQQSFSTPRTFGQGTKLEIK | | | | | | | | | 0998-x) |
| CoV2- | SYVLTQPPSVSVAPGKTANITCGGNNI | IGHV3-30- | IGHJ4 | IGLV3-21 | IGLJ3 | 2705 | ARGGATNFD | 3907 | QVWDSSS | Seth Zost et al., 2020 |
| 2933 | GRKSVHWYQQKSGQAPVLVVYDDSD | 3 | (Human) | (Human) | (Human) | | Y | | DHPEWV | (https://www.nature.co |
| | RPSGIPERFSGSNSGNTATLTISRVEAG | (Human) | | | | | | | | m/articles/s41591-020- |
| | DEADYYCQVWDSSSDHPEWVFGGGT | | | | | | | | | 0998-x) |
| | KLTVL | | | | | | | | | |
| CoV2- | DIVMTQSPLSLPVTPGEPASISCRSSQS | IGHV7-4- | IGHJ4 | IGKV2-28 | IGKJ1 | 2706 | ARPGKAAAF | 3908 | MQALQTP | Seth Zost et al., 2020 |
| 2934 | LLHSNGYNFLDWYLQKPGQSPQLLIYL | 1 | (Human) | (Human) | (Human) | | DY | | WT | (https://www.nature.co |
| | GSNRASGVPDRFSGSGSGTDFTLKISR | (Human) | | | | | | | | m/articles/s41591-020- |
| | VQAEDVGVYYCMQALQTPWTFGQG | | | | | | | | | 0998-x) |
| | TKVEIK | | | | | | | | | |
| CoV2- | SSELTQDPAVSVALGQTVRITCQGDSL | IGHV3-33 | IGHJ6 | IGLV3-19 | IGLJ3 | 2707 | ARDLHQDWV | 3909 | NSRDSSGN | Seth Zost et al., 2020 |
| 2939 | RRYYASWYQQKPGQAPVLVIYGKNN | (Human) | (Human) | (Human) | (Human) | | VVVAANVYG | | PRW | (https://www.nature.co |
| | RPSGIPDRFSGSSSGNTASLTITGAQAE | | | | | | MDV | | | m/articles/s41591-020- |
| | DEADYYCNSRDSSGNPRWFGGGTKLT | | | | | | | | | 0998-x) |
| | VL | | | | | | | | | |
| CoV2- | EIVLTQSPGTLSLSPGERATLSCRASQS | IGHV1-58 | IGHJ3 | IGKV3-20 | IGKJ2 | 2708 | AAPYCSSISCN | 3910 | QQYGSSPP | Seth Zost et al., 2020 |
| 2941 | VSSSYLAWYQQKPGQAPRLLIYGASSR | (Human) | (Human) | (Human) | (Human) | | DGFDI | | RYT | (https://www.nature.co |
| | ATGIPDRFSGSGSGTDFTLTISRLEPED | | | | | | | | | m/articles/s41591-020- |
| | FAVYYCQQYGSSPPRYTFGQGTKLEIK | | | | | | | | | 0998-x) |
| CoV2- | SYELTQPPSVSVSPGQTARITCSTDALP | IGHV2-70 | IGHJ6 | IGLV3-25 | IGLJ3 | 2709 | ARATTFFYGM | 3911 | QSVDSSGT | Seth Zost et al., 2020 |
| 2942 | NEYIYWYQQKPGQAPVLVIYKDSERPS | (Human) | (Human) | (Human) | (Human) | | DV | | YRV | (https://www.nature.co |
| | GIPERFSGSSSGTTVTLTISGVQAEDEA | | | | | | | | | m/articles/s41591-020- |
| | DYYCQSVDSSGTYRVFGGGTKLTVL | | | | | | | | | 0998-x) |
| CoV2- | DIQMTQSPSSLSASVGDRVTITCQASQ | IGHV3-30 | IGHJ4 | IGKV1-33 | IGKJ3 | 2710 | AKKGGPYCG | 3912 | QQYDNLPL | Seth Zost et al., 2020 |
| 2944 | DISNYLNWYQQKAGKAPKLLIYDASNL | (Human) | (Human) | (Human) | (Human) | | GGNCYAGYF | | A | (https://www.nature.co |
| | ETGVPSRFSGSGSGTDFTFTISSLQPDD | | | | | | DY | | | m/articles/s41591-020- |
| | IATYYCQQYDNLPLAFGPGTKVDVK | | | | | | | | | 0998-x) |

| | | | | | Not | | | | | |
|---|---|---|---|---|---|---|---|---|---|---|
| | Ab | | | Neutral- | Neutral- | | | SEQ | | SEQ |
| | or | | Doesn't | ising | ising | Protein + | | ID | | ID |
| Name | Nb | Binds to | Bind to | Vs | Vs | Epitope | Origin | NO.: | VH or VHH | NO.: |
| CoV2- | Ab | SARS-CoV1, | | | SARS-CoV2 | S; RBD | B-cells; SARS-CoV2 | 623 | EVQVVESGGGLVQPGRSLRLSCAASGFT | 1702 |
| 2945 | | SARS-CoV2 | | | | | Human Patient | | FEDYAMHWVRQAPGKGLEWVSGVSW | |
| | | | | | | | | | NSGIIGYADSVKGRFTISRDNAKNSLYLQ | |
| | | | | | | | | | MNSLRAEDTALYYCAKLDVGGYDFVSG | |
| | | | | | | | | | HYYAFDIWGQGTMVTVSS | |
| CoV2- | Ab | SARS-CoV2 | SARS- | | SARS-CoV1, | S; non- | B-cells; SARS-CoV2 | 624 | QVQLVQSGSELKKPGASVKVSCKASGYT | 1703 |
| 2947 | | | CoV1 | | SARS-CoV2 | RBD | Human Patient | | FSDYAMNWVRQAPGQGLEWMGWIN | |
| | | | | | | | | | TNTGNPTYAQGFTGRFVFSLDTSVSTAY | |
| | | | | | | | | | LQISSLKAEDTAVYYCARGLISLFRGAIFH | |
| | | | | | | | | | YYYGMDVWGQGTTVTVSS | |
| CoV2- | Ab | SARS-CoV2 | SARS- | SARS-CoV2 | | S; RBD | B-cells; SARS-CoV2 | 625 | EVQLVESGGGLVQPGGSLRLSCAASGLT | 1704 |
| 2952 | | | CoV1 | | | | Human Patient | | VRSNYMTWVRQTPGKGLEWVSVIYSG | |
| | | | | | | | | | GSTFYADSVKGRFTISRDNSKNTVYLQM | |
| | | | | | | | | | NSLRAEDTAVYYCARDLVTYGLDVWGQ | |
| | | | | | | | | | GTTVTVSS | |
| CoV2- | Ab | SARS-CoV1, | | | SARS-CoV2 | S; RBD | B-cells; SARS-CoV2 | 626 | QITLKESGPTLVKPTQTLTLTCTFSGFSLS | 1705 |
| 2953 | | SARS-CoV2 | | | | | Human Patient | | TKRVGVGWIRQPPGKALEWLALIYWDD | |
| | | | | | | | | | DQRYSPSLKSRLTITKDTSKNQVVLTMT | |
| | | | | | | | | | NMDPVDTATYYCAHSGPPDLSPVLSQG | |
| | | | | | | | | | WFDPWGQGTLVTVSS | |
| CoV2- | Ab | SARS-CoV2 | SARS- | SARS-CoV2 | | S; RBD | B-cells; SARS-CoV2 | 627 | QVQLVESGGGVVQPGRSLRLSCAASGF | 1706 |
| 2955 | | | CoV1 | | | | Human Patient | | TFVTSGIHWVRQAPGKGLEWVAVISYD | |
| | | | | | | | | | GSNKYYADSVKGRFTISRDNSKNTLYLQ | |
| | | | | | | | | | MNSLRAEDTAVYYCAKGGPNKEVLYFG | |
| | | | | | | | | | ELLDYGMDVWGQGTTVTVSS | |
| CoV2- | Ab | SARS-CoV1, | | | SARS-CoV2 | S; non- | B-cells; SARS-CoV2 | 628 | QVQVVQSGAEVKKPGASVKVSCKASGY | 1707 |
| 2960 | | SARS-CoV2 | | | | RBD | Human Patient | | TFKNYGISWVRQAPGQGLEWMGWISA | |
| | | | | | | | | | YTGNTNYAQKFQGRMTMTTDTSTGTG | |
| | | | | | | | | | YMELRSLRSDDTAVYYCARVQRRRLDY | |
| | | | | | | | | | WGQGTLVIVSS | |
| CoV2- | Ab | SARS-CoV2 | SARS- | SARS-CoV2 | | S; RBD | B-cells; SARS-CoV2 | 629 | QMQLVQSGPEVKKPGTSVKVSCKASGF | 1708 |
| 2961 | | | CoV1 | | | | Human Patient | | TFMSSAVQWVRQARGQRLEWIGWIVI | |
| | | | | | | | | | GSGNTNYAQKFQERVTITRDMSTSTAY | |
| | | | | | | | | | MELSSLRSEDTAVYYCAAPYCSSISCNDG | |
| | | | | | | | | | FDIWGQGTMVTVSS | |
| CoV2- | Ab | SARS-CoV2 | SARS- | | SARS-CoV1, | S; RBD | B-cells; SARS-CoV2 | 630 | QVQLVQSGAEVKKPGASVKVSCKASGY | 1709 |
| 2997 | | | CoV1 | | SARS-CoV2 | | Human Patient | | TFTSYYMHWVRQAPGQGLEWMGIINP | |
| | | | | | | | | | GGGSTTYAQKFQGRVTMTSDTSTSTVY | |
| | | | | | | | | | MELSSLRSEDTAMYYCARGAIPPNSRAE | |
| | | | | | | | | | IDYWGQGTLVTVSS | |
| CoV2- | Ab | SARS-CoV2 | SARS- | | SARS-CoV1, | S; RBD | B-cells; SARS-CoV2 | 631 | QVQLVESGGGVVQPGRSLRLSCAASGF | 1710 |
| 3010 | | | CoV1 | | SARS-CoV2 | | Human Patient | | TFSDYAMHWVRQAPGKGLEWVADISF | |
| | | | | | | | | | DGSNKYYADSVKGRFTISRDSSENTLYLQ | |
| | | | | | | | | | MDSLRADDTAVYYCARDLSTTWYLEM | |
| | | | | | | | | | WGPDAFDIWGQGTVVTVSS | |
| CoV2- | Ab | SARS-CoV2 | SARS- | | SARS-CoV1, | S; RBD | B-cells; SARS-CoV2 | 632 | EVQLVESGGGLVQPGGSLRLSCAASGFT | 1711 |
| 3012 | | | CoV1 | | SARS-CoV2 | | Human Patient | | FSSYDLHWVRQGTGKRLEWVSAIGTAG | |
| | | | | | | | | | DTYYLGSVKGRFTISRENAKNSLYLQMN | |
| | | | | | | | | | SLRAGDTAVYYCARVLYDSSGFYNWFDP | |
| | | | | | | | | | WGQGTLVTVSS | |
| CoV2- | Ab | SARS-CoV2 | SARS- | | SARS-CoV1, | S; RBD | B-cells; SARS-CoV2 | 633 | QVQLVESGGGVVQPGRSLRLSCAASGF | 1712 |
| 3013 | | | CoV1 | | SARS-CoV2 | | Human Patient | | TFSNYGMHWVRQAPGKGLEWVAVMS | |
| | | | | | | | | | YDGSNKYYADSVKGRFTISRDNSKNTLYL | |
| | | | | | | | | | QMNSLRAEDTAVYYCAKNLGPYCSGGT | |
| | | | | | | | | | CYSLVGDYWGQGTLVTVSS | |
| CoV2- | Ab | SARS-CoV2 | SARS- | SARS-CoV2 | | S; RBD | B-cells; SARS-CoV2 | 634 | EVQLVQSGPEVKKPGTSVKVSCKASGFT | 1713 |
| 3025 | | | CoV1 | | | | Human Patient | | FMSSAVQWVRQARGQRLEWIGWIVIG | |
| | | | | | | | | | SGNTNYAQKFQERVTITRDMSTSTAYM | |
| | | | | | | | | | ELSSLRSEDTAVYYCAAPYCSSISCNDGF | |
| | | | | | | | | | DIWGQGTMVTVSS | |
| CoV2- | Ab | SARS-CoV1, | | | SARS-CoV2 | S; RBD | B-cells; SARS-CoV2 | 635 | EVQLVESGGGVVQPGGSLRLSCAASGF | 1714 |
| 3029 | | SARS-CoV2 | | | | | Human Patient | | TEDDYAMHWVRQAPGKGLEWVSLISG | |
| | | | | | | | | | DGGNTYYADSVKGRFTISRDNSKNSLYL | |
| | | | | | | | | | QMNSLRTEDTALYYCAKDEMAYPPSHH | |
| | | | | | | | | | YYYYYMDVWGKGTTVTVSS | |
| CoV2- | Ab | SARS-CoV1, | | | SARS-CoV2 | S; non- | B-cells; SARS-CoV2 | 636 | EVQLVESGGGLVQPGGSLRLSCAASGFT | 1715 |
| 3057 | | SARS-CoV2 | | | | RBD | Human Patient | | FSSYWMSWVRQAPGKGLEWVANIKQ | |
| | | | | | | | | | DGSEKYFVDSVKGRFTISRDNAKNSLYL | |
| | | | | | | | | | QMNSLRAEDAAVYYCARLVTTVTTANG | |
| | | | | | | | | | LYYYSYYYMDVWGKGTTVTVSS | |

| | | | | | | SEQ | | SEQ | | |
|---|---|---|---|---|---|---|---|---|---|---|
| | | Heavy V | Heavy J | Light V | Light J | ID | | ID | | |
| Name | VL | Gene | Gene | Gene | Gene | NO.: | CDRH3 | NO.: | CDRL3 | Sources |
| CoV2- | DVVMTQSPLSLPVTLGQPASISCRSSQ | IGHV3-9 | IGHJ3 | IGKV2-30 | IGKJ2 | 2711 | AKLDVGGYDF | 3913 | MQGTHW | Seth Zost et al., 2020 |
| 2945 | SLVYSDGNTYLNWFQQRPGQSPRRLI | (Human) | (Human) | (Human) | (Human) | | VSGHYYAFDI | | PYT | (https://www.nature.co |
| | YKVSSRDSGVPDRFSGSGSGTAFTLKIS | | | | | | | | | m/articles/s41591-020- |
| | RVEAEDVGVYYCMQGTHWPYTFGQ | | | | | | | | | 0998-x) |
| | GTKLEIK | | | | | | | | | |
| CoV2- | QSALTQPRSVSGSPGQSVTISCTGTSS | IGHV7-4- | IGHJ6 | IGLV2-11 | IGLJ3 | 2712 | ARGLISLFRGA | 3914 | CSYAGRYT | Seth Zost et al., 2020 |
| 2947 | DVGGYTYVSWYQQHPGKAPKLMIYD | (Human) | (Human) | (Human) | (Human) | | IFHYYYGMDV | | WV | (https://www.nature.co |
| | VNKRPSGVPDRFSGSKSGITASLTISGL | | | | | | | | | m/articles/s41591-020- |
| | QAEDEADYYCCSYAGRYTWVFGGGTT | | | | | | | | | 0998-x) |
| | LTVL | | | | | | | | | |
| CoV2- | DIQLTQSPSFLSASVGDRVTITCRASQG | IGHV3-66 | IGHJ6 | IGKV1-9 | IGKJ5 | 2713 | ARDLVTYGLD | 3915 | QLLNSHPL | Seth Zost et al., 2020 |
| 2952 | ISNYLAWYQQKPGTAPNLLIYAASTLQ | (Human) | (Human) | (Human) | (Human) | | V | | T | (https://www.nature.co |
| | SGVPSRFSGSGSGTEFTLTISSLQPEDF | | | | | | | | | m/articles/s41591-020- |
| | ATYYCQLLNSHPLTFGQGTRLEIK | | | | | | | | | 0998-x) |
| CoV2- | SYELTQPPSVSVSPGQTARITCSGDALP | IGHV2-5 | IGHJ5 | IGLV3-25 | IGLJ3 | 2714 | AHSGPPDLSP | 3916 | QSADSTG | Seth Zost et al., 2020 |
| 2953 | KQYAYWYQQKPGQAPVLVIYRDSERP | (Human) | (Human) | (Human) | (Human) | | VLSQGWFDP | | WV | (https://www.nature.co |
| | SGIPERFSGSTSGTTVTLTISGVQAEDE | | | | | | | | | m/articles/s41591-020- |
| | ADYYCQSADSTGWVFGGGTKLTVL | | | | | | | | | 0998-x) |
| CoV2- | DIVMTQTPLSLSVTPGQPASFSCKSSQ | IGHV3-30 | IGHJ6 | IGKV2D-29 | IGKJ2 | 2715 | AKGGPNKEVL | 3917 | MQSIQLPY | Seth Zost et al., 2020 |
| 2955 | SLLHSDGKTYLYWYLQKPGQSPQLLIY | (Human) | (Human) | (Human) | (Human) | | YFGELLDYGM | | T | (https://www.nature.co |
| | AVSNRFSGVPDRFSGSGSGTDFTLKIS | | | | | | DV | | | m/articles/s41591-020- |
| | RVEAEDVGVYYCMQSIQLPYTFGQGT | | | | | | | | | 0998-x) |
| | KLEIK | | | | | | | | | |
| CoV2- | DIVVTQTPLSLSVTPGQPASISCKSSETL | IGHV1-18 | IGHJ4 | IGKV2D-29 | IGKJ5 | 2716 | ARVQRRRLDY | 3918 | MQSIQLA | Seth Zost et al., 2020 |
| 2960 | LHSDGKTYLSWYLQKPGQPPQLLIYEV | (Human) | (Human) | (Human) | (Human) | | | | | (https://www.nature.co |
| | SNRFSGVPDRFSGSGSGTDFTLKIGRV | | | | | | | | | m/articles/s41591-020- |
| | EAEDVGLYYCMQSIQLAFGQGTRLEIE | | | | | | | | | 0998-x) |
| CoV2- | ETVLTQSPGTLSLSPGERATLSCRASQS | IGHV1-58 | IGHJ3 | IGKV3-20 | IGKJ1 | 2717 | AAPYCSSISCN | 3919 | QHYGSSRG | Seth Zost et al., 2020 |
| 2961 | VSSSYLAWYQQKPGQAPRLLIYGASSR | (Human) | (Human) | (Human) | (Human) | | DGFDI | | WT | (https://www.nature.co |
| | ATGIPDRFSGSGSGTDFTLTISRLEPED | | | | | | | | | m/articles/s41591-020- |
| | FAVYYCQHYGSSRGWTFGQGTKVEIK | | | | | | | | | 0998-x) |
| CoV2- | EIVMTQSPATLSVSPGERVTLSCRASQ | IGHV1-46 | IGHJ4 | IGKV3-15 | IGKJ4 | 2718 | ARGAIPPNSR | 3920 | QQYYNWP | Seth Zost et al., 2020 |
| 2997 | SVSSNLAWCQQKPGQAPRLLIYGAST | (Human) | (Human) | (Human) | (Human) | | AEIDY | | LT | (https://www.nature.co |
| | RATGIPARFSGSGSGTEFTLTISSLQSE | | | | | | | | | m/articles/s41591-020- |
| | DFAVYYCQQYYNWPLTFGGGTKVEIK | | | | | | | | | 0998-x) |
| CoV2- | DIQMTQSPSTLSASIGDRVTITCRASQS | IGHV3-30- | IGHJ3 | IGKV1-5 | IGKJ2 | 2719 | ARDLSTTWYL | 3921 | QQYNSYPY | Seth Zost et al., 2020 |
| 3010 | ISSWLAWYQQIPGKAPKLLIYKASSLES | 3 | (Human) | (Human) | (Human) | | EMWGPDAF | | T | (https://www.nature.co |
| | GVPSRFSGSGSGTEFTLTISSLQPDDFA | (Human) | | | | | DI | | | m/articles/s41591-020- |
| | TYYCQQYNSYPYTFGQGTKLEIK | | | | | | | | | 0998-x) |
| CoV2- | DIQMTQSPSSLSASVGDRVTITCRASQ | IGHV3-13 | IGHJ5 | IGKV1-39 | IGKJ1 | 2720 | ARVLYDSSGF | 3922 | QQSYEIPP | Seth Zost et al., 2020 |
| 3012 | SISSYLNWYQQKPGKAPKLLIYAASSLE | (Human) | (Human) | (Human) | (Human) | | YNWFDP | | WT | (https://www.nature.co |
| | SGVPSRFSGSGSGTDFTLTISSLQPEDF | | | | | | | | | m/articles/s41591-020- |
| | ATYYCQQSYEIPPWTFGQGTKVEIK | | | | | | | | | 0998-x) |
| CoV2- | DIQMTQSPSSLSASVGDRVTITCQASQ | IGHV3-30 | IGHJ4 | IGKV1-33 | IGKJ3 | 2721 | AKNLGPYCSG | 3923 | QQYANLPF | Seth Zost et al., 2020 |
| 3013 | DISNYLNWYQQKPGKAPKLLIYDASNL | (Human) | (Human) | (Human) | (Human) | | GTCYSLVGDY | | T | (https://www.nature.co |
| | ETGVPSRFSGSGSGTDFTFTISSLQPED | | | | | | | | | m/articles/s41591-020- |
| | IATYYCQQYANLPFTFGPGTKVDIK | | | | | | | | | 0998-x) |
| CoV2- | EIVLTQSPGTLSLSPGERATLSCRASQS | IGHV1-58 | IGHJ3 | IGKV3-20 | IGKJ1 | 2722 | AAPYCSSISCN | 3924 | QHYGSSRG | Seth Zost et al., 2020 |
| 3025 | VSSSYLAWYQQKPGQAPRLLIYGASSR | (Human) | (Human) | (Human) | (Human) | | DGFDI | | WT | (https://www.nature.co |
| | ATGIPDRFSGSGSGTDFTLTISRLEPED | | | | | | | | | m/articles/s41591-020- |
| | FAVYYCQHYGSSRGWTFGQGTKVEIK | | | | | | | | | 0998-x) |
| CoV2- | SYELTQPPSVSVSPGQTARITCSTDALP | IGHV3-43 | IGHJ6 | IGLV3-25 | IGLJ2 | 2723 | AKDEMAYPP | 3925 | QSVDSSGT | Seth Zost et al., 2020 |
| 3029 | NEYIYWYQQKPGQAPVLVIYKDSERPS | (Human) | (Human) | (Human) | (Human) | | SHHYYYYYMD | | YPHVI | (https://www.nature.co |
| | GIPERFSGSSSGTTVTLTISGVQAEDEA | | | | | | V | | | m/articles/s41591-020- |
| | DYYCQSVDSSGTYPHVIFGGGTKLTVL | | | | | | | | | 0998-x) |
| CoV2- | QSVLTQPPSVSGAPGQRVTISCTGSSS | IGHV3-7 | IGHJ6 | IGLV1-40 | IGLJ2 | 2724 | ARLVTTVTTA | 3926 | QSYASSLS | Seth Zost et al., 2020 |
| 3057 | NIGAGYDVHWYQQLPGTAPKLLIYGN | (Human) | (Human) | (Human) | (Human) | | NGLYYYSYYY | | AHVV | (https://www.nature.co |
| | TNRPSGVPDRFSGSKSGTSASLAITGL | | | | | | | | | m/articles/s41591-020- |
| | QAEDEADYYCQSYASSLSAHVVFGGG | | | | | | | | | 0998-x) |
| | TKLTVL | | | | | | | | | |

| | | | | | Not | | | | | |
|---|---|---|---|---|---|---|---|---|---|---|
| | Ab | | | Neutral- | Neutral- | | | SEQ | | SEQ |
| | or | | Doesn't | ising | ising | Protein + | | ID | | ID |
| Name | Nb | Binds to | Bind to | Vs | Vs | Epitope | Origin | NO.: | VH or VHH | NO.: |
| CoV2 | Ab | SARS-CoV1, | | | SARS-CoV2 | S; non- | B-cells; SARS-CoV2 | 637 | EVQLVESGGGAVQPGRSLRLSCAASGFT | 1716 |
| 3058 | | SARS-CoV2 | | | | RBD | Human Patient | | FSTYAMYWVRQAPGKGLEWVAVISYD | |
| | | | | | | | | | GSNRYYADSVKGRFTISRDNSKNTLYLQ | |
| | | | | | | | | | MNSLRPEDTAVYYCARDRSGNYRDAFD | |
| | | | | | | | | | IWGQGTMVTVSS | |
| CoVA1- | Ab | SARS-CoV2 | SARS- | | SARS-CoV1, | S; non- | B-cells; SARS-CoV2 | 638 | HQHQVEQGPGGVEQSETLFLTCCVSGG | 1717 |
| 01 | | | CoV1 | | SARS-CoV2 | RBD | Human Patient | | FTISSCYKRGGIRQPPRKGEEWAVSSYYS | |
| | | | | | | | | | SSTYYTPSLKSRVTISVDKSKNQFSLKMSS | |
| | | | | | | | | | VTAADTAVYYCARVSSGYYFTPFDYWG | |
| | | | | | | | | | QGTRGHRLF | |
| CoVA1- | Ab | SARS-CoV2 | SARS- | | SARS-CoV1, | S; non- | B-cells; SARS-CoV2 | 639 | EVQLVESGGGVVQPGRSLRLSCAASGFT | 1718 |
| 02 | | | CoV1 | | SARS-CoV2 | RBD | Human Patient | | FSIYAMHWVRQAPGKGLEWVAVISYD | |
| | | | | | | | | | GSNQYYADSVRGRFTISRGNSKNTLYLQ | |
| | | | | | | | | | MNSLRPEDTAVYYCARARGGSYNDAFD | |
| | | | | | | | | | IWGQGTMVTVSS | |
| CoVA1- | Ab | SARS-CoV2 | SARS- | SARS-CoV2 | SARS-CoV1 | Unk | B-cells; SARS-CoV2 | 640 | EVQLVESGGGVVQPGRSLRLSCAASGFT | 1719 |
| 03 | | | CoV1 | | | | Human Patient | | FSSYGMHWVRQAPGKGLEWVAVISYD | |
| | | | | | | | | | GSNKYYADSVKGRFTISRDNSKNTLYLQ | |
| | | | | | | | | | MNSLRAEDTAVYYCAKDGQYYDFWSGY | |
| | | | | | | | | | LGARTNPHYYYYMDVWGKGTMVTVSS | |
| CoVA1- | Ab | SARS-CoV2 | SARS- | | SARS-CoV1, | S; non- | B-cells; SARS-CoV2 | 641 | EVQLVQSGGGLVQPGRSLRLSCAASGFT | 1720 |
| 06 | | | CoV1 | | SARS-CoV2 | RBD | Human Patient | | FGEYAMHWVRQAPGKGLEWVSGISW | |
| | | | | | | | | | NSGSIDYADSVKGRFTISRDNAKNSLYLQ | |
| | | | | | | | | | MNSLRAEDTALYYCAKDMGEAVAGTHY | |
| | | | | | | | | | GMDVWGQGTMVTASS | |
| CoVA1- | Ab | SARS-CoV1, | | | SARS-CoV1, | S; non- | B-cells; SARS-CoV2 | 642 | QVQLVESGAEVKKPGSSVKVSCKASGGT | 1721 |
| 07 | | SARS-CoV2 | | | SARS-CoV2 | RBD | Human Patient | | LSSYAITWVRQAPGQGLEWVGGIIPIFG | |
| | | | | | | | | | TANYAQKFQGRVTITADESTSTAYMELS | |
| | | | | | | | | | SLRSEDTAVYYCARVGAYDSSGYSNDYW | |
| | | | | | | | | | GQGTLVTVSS | |
| CoVA1- | Ab | SARS-CoV2 | SARS- | | SARS-CoV1, | S; RBD | B-cells; SARS-CoV2 | 643 | EVQLVESGGGVVQPGGSLRLSCAASGF | 1722 |
| 08 | | | CoV1 | | SARS-CoV2 | | Human Patient | | TFSSYAMHWVRQAPGKGLEWVAVISY | |
| | | | | | | | | | DGSNKYYADSVKGRFTISRDNSKNTLYL | |
| | | | | | | | | | QMNSLRAEDTAVYYCAREDYYDSSGSF | |
| | | | | | | | | | DYWGQGTLVTVSS | |
| CoVA1- | Ab | SARS-CoV2 | SARS- | | SARS-CoV1, | S; non- | B-cells; SARS-CoV2 | 644 | QLQLVESGPGLVKPSETLSLTCTVSGGSI | 1723 |
| 09 | | | CoV1 | | SARS-CoV2 | RBD | Human Patient | | SSYFWSWIRQPPGKGLEWIGYIYYSGST | |
| | | | | | | | | | NYNPSLKSRVTISVDTSKNQFSLKLSSVTA | |
| | | | | | | | | | ADTAVYYCARHSQGWLQQAVAFDIWG | |
| | | | | | | | | | QGTMVTVSS | |
| CoVA1- | Ab | SARS-CoV2 | SARS- | | SARS-CoV1, | S; RBD | B-cells; SARS-CoV2 | 645 | EVQLVESGGGLVQPGGSLRLSCAASGFT | 1724 |
| 10 | | | CoV1 | | SARS-CoV2 | | Human Patient | | VTSTYMTWVRRAPGKGLEWVSIIYNDD | |
| | | | | | | | | | TTYYADSVKDRVTVSRDDSKNTLYLQM | |
| | | | | | | | | | NSLRAEDTAIYYCARGGYYYDPSGYYSRS | |
| | | | | | | | | | FSFDYWGQGTLVTVSS | |
| CoVA1- | Ab | SARS-CoV2 | SARS- | SARS-CoV2 | SARS-CoV1 | S; RBD | B-cells; SARS-CoV2 | 646 | EVQLVQSGTEVKKPGASVKVSCKASGYT | 1725 |
| 12 | | | CoV1 | | | | Human Patient | | FPGYYIHWVRQAPGQGLEWMGWINP | |
| | | | | | | | | | NSGVAKSAQKFQGRVTMTRDSSISTVYL | |
| | | | | | | | | | DVTSDDTAVYYCARDLVWATVSGTMD | |
| | | | | | | | | | VWGQGTTVTVSS | |
| CoVA1- | Ab | SARS-CoV1, | | SARS-CoV1, | | S; RBD | B-cells; SARS-CoV2 | 647 | QVQLVQSGAEVKKPGASVKVSCKASGY | 1726 |
| 16 | | SARS-CoV2 | | SARS-CoV2 | | | Human Patient | | TFTSYYMHWVRQAPGQGLEWMGIINS | |
| | | | | | | | | | SGGSTSYAQKFQGRVTMTRDTSTSTVY | |
| | | | | | | | | | MELSSLRSEDTAVYYCARPPRNYYDRSG | |
| | | | | | | | | | YYQRAEYFQHWGQGTLVTVSS | |
| CoVA1- | Ab | SARS-CoV2 | SARS- | SARS-CoV2 | SARS-CoV1 | S; RBD | B-cells; SARS-CoV2 | 648 | EVQLVESGGGLVQPGGSLRLSCAASGFT | 1727 |
| 18 | | | CoV1 | | | | Human Patient | | VSSNYMSWVRQAPGKGLEWVSVIYSG | |
| | | | | | | | | | GSTYYADSVKGRFTISRDNSKNTLYLQM | |
| | | | | | | | | | NSLRAEDTAVYYCARVEWAAAGTFYWG | |
| | | | | | | | | | QGTLVTVSS | |

| | | | | | | SEQ | | SEQ | | |
|---|---|---|---|---|---|---|---|---|---|---|
| | | Heavy V | Heavy J | Light V | Light J | ID | | ID | | |
| Name | VL | Gene | Gene | Gene | Gene | NO.: | CDRH3 | NO.: | CDRL3 | Sources |
| CoV2 | DIVMTQSPDSLAVSLGERATINCKSSQ | IGHV3-30 | IGHJ3 | IGKV4-1 | IGKJ2 | 2725 | ARDRSGNYR | 3927 | QQYYSSYT | Seth Zost et al., 2020 |
| 3058 | SVLYSSNNENYLAWYQQKPGQPPKLLI | (Human) | (Human) | (Human) | (Human) | | DAFDI | | | (https://www.nature.co |
| | YWASTRESGVPDRFSGSGSGTDFTLTI | | | | | | | | | m/articles/s41591-020- |
| | SSLQAEDVAVYYCQQYYSSYTFGQGTK | | | | | | | | | 0998-x) |
| | VEIK | | | | | | | | | |
| CoVA1- | EIVMTQSPGTLSLSPGERATLSCRASQ | IGHV4-39 | IGHJ4 | IGKV3-20 | IGKJ3 | 2726 | ARVSSGYYFT | 3928 | QQYGSSPP | Philip Brouwer et al., |
| 01 | SVSSSYLAWYQQKPGQAPRLLIYGASS | (Human) | (Human) | (Human) | (Human) | | PFDY | | PFT | 2020 |
| | RATGIPDRFSGSGSGTDFTLTISRLEPE | | | | | | | | | (https://science.science |
| | DFAVYYCQQYGSSPPPFTFGPGTKVDI | | | | | | | | | mag.org/content/early/ |
| | K | | | | | | | | | 2020/06/15/science.abc |
| | | | | | | | | | | 5902) |
| CoVA1- | NFMLTQPASVSGSPGQSITISCTGASS | IGHV3-30 | IGHJ3 | IGLV2-14 | IGLJ3 | 2727 | ARARGGSYN | 3929 | SSYTSSSTP | Philip Brouwer et al., |
| 02 | DVGGYNYVSWYQQHPGKAPKLMIYD | (Human) | (Human) | (Human) | (Human) | | DAFDI | | VV | 2020 |
| | VSNRPSGVSNRFSGSKSGNTASLTISGL | | | | | | | | | (https://science.science |
| | QAEDEADYYCSSYTSSSTPVVFGGGTE | | | | | | | | | mag.org/content/early/ |
| | LTVL | | | | | | | | | 2020/06/15/science.abc |
| | | | | | | | | | | 5902) |
| CoVA1- | DIVMTQSPSSLSASVGDRVTITCRASQ | IGHV3-30 | IGHJ6 | IGKV1-27 | IGKJ3 | 2728 | AKDGQYYDF | 3930 | QKYNSAPP | 2020/06/15/science.abc |
| 03 | GISNYLAWYQQKPGKVPKLLIYAASTL | (Human) | (Human) | (Human) | (Human) | | WSGYLGART | | A | Philip Brouwer et al., |
| | QSGVPSRFSGSGSGTDFTLTISSLQPED | | | | | | NPHYYYYMD | | | 2020 |
| | VATYYCQKYNSAPPAFGQGTKVDIK | | | | | | V | | | (https://science.science |
| | | | | | | | | | | mag.org/content/early/ |
| | | | | | | | | | | 5902) |
| CoVA1- | QSALTQPPSVSVSPGQTASIPCSGDKL | IGHV3-9 | IGHJ6 | IGLV3-1 | IGLJ3 | 2729 | AKDMGEAVA | 3931 | QAWGSTT | 2020/06/15/science.abc |
| 06 | GDIYACWYQQKPGQSPVLVIYQDTKR | (Human) | (Human) | (Human) | (Human) | | GTHYGMDV | | AKV | Philip Brouwer et al., |
| | PSGIPERFSGSNSGNTATLTISGTQAM | | | | | | | | | 2020 |
| | DEADYYCQAWGSTTAKVFGGGTKLTV | | | | | | | | | (https://science.science |
| | P | | | | | | | | | mag.org/content/early/ |
| | | | | | | | | | | 5902) |
| CoVA1- | DIQLTQSPATLSLSPGERATLSCRASQS | IGHV1-69 | IGHJ4 | IGKV3-11 | IGKJ4 | 2730 | ARVGAYDSSG | 3932 | QQRSNWP | 2020/06/15/science.abc |
| 07 | VSSYLAWYQQKPGQAPRLLIYDASNR | (Human) | (Human) | (Human) | (Human) | | YSNDY | | PRVT | Philip Brouwer et al., |
| | ATGIPARFSGSGSGTDFTLTISSLEPEDF | | | | | | | | | 2020 |
| | AVYYCQQRSNWPPRVTFGGGTKVEIK | | | | | | | | | (https://science.science |
| | | | | | | | | | | mag.org/content/early/ |
| | | | | | | | | | | 5902) |
| CoVA1- | QSVLTQPASVSGSPGQSITISCTGTSSD | IGHV3-30 | IGHJ4 | IGLV2-14 | IGLJ3 | 2731 | AREDYYDSSG | 3933 | SSYTSSSTR | Philip Brouwer et al., |
| 08 | VGGYNYVSWYQQHPGKAPKLMIYDV | (Human) | (Human) | (Human) | (Human) | | SFDY | | HWV | 2020 |
| | SNRPSGVSNRFSGSKSGNTASLTISGL | | | | | | | | | (https://science.science |
| | QAEDEADYYCSSYTSSSTRHWVFGGG | | | | | | | | | mag.org/content/early/ |
| | TKLTVL | | | | | | | | | 2020/06/15/science.abc |
| | | | | | | | | | | 5902) |
| CoVA1- | DIQMTQSPSSLSASVRDRVTITCRASQ | IGHV4-59 | IGHJ3 | IGKV1-39 | IGKJ1 | 2732 | ARHSQGWLQ | 3934 | QQSYSTPY | Philip Brouwer et al., |
| 09 | SITSSLNWYQQKPGKAPKLLIYAASSLQ | (Human) | (Human) | (Human) | (Human) | | QAVAFDI | | T | 2020 |
| | SGVPSRFSGSGSGTDFTLTISSLQPEDF | | | | | | | | | (https://science.science |
| | ATYYCQQSYSTPYTFGQGTKVEIK | | | | | | | | | mag.org/content/early/ |
| | | | | | | | | | | 2020/06/15/science.abc |
| | | | | | | | | | | 5902) |
| CoVA1- | NFMLTQPASVSGSPGQSITISCTGSSS | IGHV3-66 | IGHJ4 | IGLV2-14 | IGLJ3 | 2733 | ARGGYYYDPS | 3935 | SAYTTTSTS | Philip Brouwer et al., |
| 10 | DIAPYTFVSWYQQHSGTAPKLIIYDVR | (Human) | (Human) | (Human) | (Human) | | GYYSRSFSFDY | | WV | 2020 |
| | NRPSGISDRFSGSRSGNTASLSISGLQA | | | | | | | | | (https://science.science |
| | EDEADYYCSAYTTTSTSWVFGGGTKLT | | | | | | | | | mag.org/content/early/ |
| | VL | | | | | | | | | 2020/06/15/science.abc |
| | | | | | | | | | | 5902) |
| CoVA1- | QSALTQPPSASGSPGQSVTISCTGTSS | IGHV1-2 | IGHJ6 | IGLV2-8 | IGLJ3 | 2734 | ARDLVWATV | 3936 | SSYVGNN | Philip Brouwer et al., |
| 12 | DIGTYNYVSWYQQHPGKAPKLMIYEV | (Human) | (Human) | (Human) | (Human) | | SGTMDV | | NWV | 2020 |
| | TKRPSGVPDRFSGSKSGNTASLTVSGL | | | | | | | | | (https://science.science |
| | QADDEGDYYCSSYVGNNNWVFGGG | | | | | | | | | mag.org/content/early/ |
| | TKLTVL | | | | | | | | | 2020/06/15/science.abc |
| | | | | | | | | | | 5902) |
| CoVA1- | DIQLTQSPSSLSASVGDRVTITCQASQ | IGHV1-46 | IGHJ1 | IGKV1-33 | IGKJ4 | 2735 | ARPPRNYYDR | 3937 | QQYDNPP | Philip Brouwer et al., |
| 16 | DISNYLNWYQQRPGKAPKLLIYDASNL | (Human) | (Human) | (Human) | (Human) | | SGYYQRAEYF | | LT | 2020 |
| | ETGVPSRFSGSGSGTDFTFTISSLQPED | | | | | | QH | | | (https://science.science |
| | IATYYCQQYDNPPLTFGGGTKLEIK | | | | | | | | | mag.org/content/early/ |
| | | | | | | | | | | 2020/06/15/science.abc |
| | | | | | | | | | | 5902), Hejun Liu et al |
| | | | | | | | | | | 2020 |
| | | | | | | | | | | (https://www.biorxiv.or |
| | | | | | | | | | | g/content/10.1101/202 |
| | | | | | | | | | | 0.08.02.233536v1.full. |
| | | | | | | | | | | pdf) |
| CoVA1- | QSALTQEPSLTVSPGGTVTLTCGSSTG | IGHV3-66 | IGHJ4 | IGLV7-46 | IGLJ3 | 2736 | ARVEWAAAG | 3938 | LLSYSGVW | Philip Brouwer et al., |
| 18 | AVTSGHYPYWFQQKPGQAPRTLIYDT | (Human) | (Human) | (Human) | (Human) | | TFY | | V | 2020 |
| | SNKRSWTPARFSGSLLGGKAALTLSGA | | | | | | | | | (https://science.science |
| | QPEDEAEYYCLLSYSGVWVFGGGTKL | | | | | | | | | mag.org/content/early/ |
| | TVL | | | | | | | | | 2020/06/15/science.abc |
| | | | | | | | | | | 5902) |

| | | | | | Not | | | | | |
|---|---|---|---|---|---|---|---|---|---|---|
| | Ab | | | Neutral- | Neutral- | | | SEQ | | SEQ |
| | or | | Doesn't | ising | ising | Protein + | | ID | | ID |
| Name | Nb | Binds to | Bind to | Vs | Vs | Epitope | Origin | NO.: | VH or VHH | NO.: |
| CoVA1- | Ab | SARS-CoV2 | SARS- | | SARS-CoV1, | S; non- | B-cells; SARS-CoV2 | 649 | QVQLVESGGGLVKPGGSLRLSCAASGFT | 1728 |
| 19 | | | CoV1 | | SARS-CoV2 | RBD | Human Patient | | FSSYSMNWVRQAPGKGLEWVSSISSSSS | |
| | | | | | | | | | FIYYADSVKGRFTISRDNAKNSLYLQMNS | |
| | | | | | | | | | LRAEDTAVYYCARWKSDYYDSSGYYPAA | |
| | | | | | | | | | FDIWGQRDKWSPSS | |
| CoVA1- | Ab | SARS-CoV2 | SARS- | | SARS-CoV1, | S; non- | B-cells; SARS-CoV2 | 650 | QVQLVESGGGLVKPGGSLRLSCAASGFT | 1729 |
| 20 | | | CoV1 | | SARS-CoV2 | RBD | Human Patient | | FSSYSMNWVRQAPGKGLEWVSSISSSSS | |
| | | | | | | | | | YIYYADSVKGRFTISRDDAKNSLFLQMNS | |
| | | | | | | | | | LRAEDTAVYYCAGDQNLYCSGDSCYYHY | |
| | | | | | | | | | YGMDVWGQGTVVTVSS | |
| CoVA1- | Ab | SARS-CoV2 | SARS- | SARS-CoV2 | SARS-CoV1 | S; non- | B-cells; SARS-CoV2 | 651 | EVQLVESGGGVVQPGRSLRLSCAASGFT | 1730 |
| 21 | | | CoV1 | | | RBD | Human Patient | | FSSYAMHWVRQAPGKGLEWVAVISYD | |
| | | | | | | | | | GSNKYYADSVKGRFTISRDNTKNTLYLQ | |
| | | | | | | | | | MNSLRAEDTAVYYCARDSEYYDILTGYL | |
| | | | | | | | | | APTHYYYYYMDVWGKGTTVTVSS | |
| CoVA1- | Ab | SARS-CoV2 | SARS- | | SARS-CoV1, | S; non- | B-cells; SARS-CoV2 | 652 | EVQLVESGAEVKKPGASVKVSCKASGYT | 1731 |
| 22 | | | CoV1 | | SARS-CoV2 | RBD | Human Patient | | FTSYGISWVRQAPGQGLEWMGWISAY | |
| | | | | | | | | | NGYTNSAQKLQGRVTMITTDTSTSTAYM | |
| | | | | | | | | | ELRSLRSDDTAVYYCARDLVDTAMVQTL | |
| | | | | | | | | | DDYGMDVWGQGTMVTVSS | |
| CoVA1- | Ab | SARS-CoV2 | SARS- | | SARS-CoV1, | S; non- | B-cells; SARS-CoV2 | 653 | QVQLVQSGAEVKKPGESLKISCKGSGYR | 1732 |
| 23 | | | CoV1 | | SARS-CoV2 | RBD | Human Patient | | FTTYWIGWVRQMPGKGLEWMGIIYPG | |
| | | | | | | | | | DSDTRYSPSFQGQVTISADKSISTAYLQW | |
| | | | | | | | | | SSLTASDTAIYYCARYYYDSRGYTSIDFW | |
| | | | | | | | | | GQGTLVTVSS | |
| CoVA1- | Ab | SARS-CoV2 | SARS- | | SARS-CoV1, | S; non- | B-cells; SARS-CoV2 | 654 | EVQLVESGPGLVKPSETLSLTCTVSGGSI | 1733 |
| 25 | | | CoV1 | | SARS-CoV2 | RBD | Human Patient | | SSTSYYWGWIRQPPGKGLECIGSIYYSGS | |
| | | | | | | | | | TYYNPSLKSRVTISVDTSKNQFSLKLSSVT | |
| | | | | | | | | | AADTAVYYCARLNYDFWSGYYSYALYY | |
| | | | | | | | | | MDVWGKGTMVTVSS | |
| CoVA1- | Ab | SARS-CoV2 | SARS- | | SARS-CoV1, | S; non- | B-cells; SARS-CoV2 | 655 | QLQLQESGPGLVKPSQTLSLTCTVSGGSI | 1734 |
| 26 | | | CoV1 | | SARS-CoV2 | RBC | Human Patient | | SSGGYYWSWIRQLPGKGLEWIGYIYYSG | |
| | | | | | | | | | STYYNPSLKSRVTISVDTSKNQFSLNLSSV | |
| | | | | | | | | | TAADTAVYYCARQQLDYYDSSGCFDYW | |
| | | | | | | | | | GQGTLVTVSS | |
| CoVA1- | Ab | SARS-CoV1, | | | SARS-CoV1, | S; non- | B-cells; SARS-CoV2 | 656 | EVQLVESGPGLVKPSETLSLTCTVSGGSI | 1735 |
| 27 | | SARS-CoV2 | | | SARS-CoV2 | RBD | Human Patient | | SSYYWSWIRQPPGKRLEWIGYIYYSGST | |
| | | | | | | | | | NYNPSLKSRVTISVDTSKNQFSLKLNSVT | |
| | | | | | | | | | AADTAAYYCARGFDYWGQGTRVTVSS | |
| CoVA2- | Ab | SARS-CoV2 | SARS- | | SARS-CoV1, | S; RBD | B-cells; SARS-CoV2 | 657 | EVQLVESGGGLVQPGGSLRLSCAASGFT | 1736 |
| 01 | | | CoV1 | | SARS-CoV2 | | Human Patient | | FSSYDMHWVRQTTGKGLQWVSAIGTA | |
| | | | | | | | | | GDTYYPGSVKGRFTISRENAKNSLYLQM | |
| | | | | | | | | | NSLRAGDTAVYYCARGGDRYPVGYFDL | |
| | | | | | | | | | WGRGTLVTVSS | |
| CoVA2- | Ab | SARS-CoV1, | | SARS-CoV1, | | S; RBD | B-cells; SARS-CoV2 | 658 | VQLQQESGPGLVKPSETLSLTCTVSGGSI | 1737 |
| 02 | | SARS-CoV2 | | SARS-CoV2 | | | Human Patient | | SSSSYYWGWIRQPPGKGLEWIGSIYYSG | |
| | | | | (weak) | | | | | STYYNPSLKSRVTISVDTSKNQFSLKLSSV | |
| | | | | | | | | | TAADTAVYYCARRSTSRWGYYYMDVW | |
| | | | | | | | | | GKGTRVTVSS | |
| CoVA2- | Ab | SARS-CoV2 | SARS- | | SARS-CoV1, | S; non- | B-cells; SARS-CoV2 | 659 | EVQLVESGGGLVQPGGSLRLSCAASGFT | 1738 |
| 03 | | | CoV1 | | SARS-CoV2 | RBD | Human Patient | | FSSYSMNWVRQAPGKGLEWVSYISSSSS | |
| | | | | | | | | | TIYYADSVKGRFTISRDNAKNSLYLQMNS | |
| | | | | | | | | | LRAEDTAVYYCAREANSDFWSGYLGYFD | |
| | | | | | | | | | YWGQGTLVTVSS | |
| CoVA2- | Ab | SARS-CoV2 | SARS- | SARS-CoV2 | SARS-CoV1 | S; RBD | B-cells; SARS-CoV2 | 660 | QVQLVETGGGLIQPGGSLRLSCAASGFT | 1739 |
| 04 | | | CoV1 | | | | Human Patient | | VSSNYMSWVRQAPGKGLEWVSVIYSG | |
| | | | | | | | | | GSTFYADSVKGRFTISRDNSKNTLYLQM | |
| | | | | | | | | | NSLRAEDTAVYYCARDLERAGGMDVW | |
| | | | | | | | | | GQGTMVTVSS | |

| | | | | | | SEQ | | SEQ | | |
|---|---|---|---|---|---|---|---|---|---|---|
| | | Heavy V | Heavy J | Light V | Light J | ID | | ID | | |
| Name | VL | Gene | Gene | Gene | Gene | NO.: | CDRH3 | NO.: | CDRL3 | Sources |
| CoVA1- | EIVMTQSPATLSVSPGERATLSCRASQ | IGHV3-21 | IGHJ3 | IGKV3-15 | IGKJ1 | 2737 | ARWKSDYYD | 3939 | QQYNNWP | Philip Brouwer et al., |
| 19 | SVSSNLAWYQQKPGQAPRLLIYGAST | (Human) | (Human) | (Human) | (Human) | | SSGYYPAAFDI | | PWT | 2020 |
| | RATGIPARFSGSGSGTEFTLTISSLQSE | | | | | | | | | (https://science.science |
| | DFAVYYCQQYNNWPPWTFGQGTKV | | | | | | | | | mag.org/content/early/ |
| | EIK | | | | | | | | | 2020/06/15/science.abc |
| | | | | | | | | | | 5902) |
| CoVA1- | NFMLTQPPSVSVAPGKTARITCGGNN | IGHV3-21 | IGHJ6 | IGLV3-21 | IGLJ3 | 2738 | AGDQNLYCS | 3940 | QVWDSSS | Philip Brouwer et al., |
| 20 | IGSKSVHWYQQKPGQAPVLVIYYDSD | (Human) | (Human) | (Human) | (Human) | | GDSCYYHYYG | | DHWV | 2020 |
| | RPSGIPERFSGSNSGNTATLTISRVEAG | | | | | | MDV | | | (https://science.science |
| | DEADYYCQVWDSSSDHWVFGGGTKL | | | | | | | | | mag.org/content/early/ |
| | TVL | | | | | | | | | 2020/06/15/science.abc |
| | | | | | | | | | | 5902) |
| CoVA1- | EIVMTQSPATLSVSPGERATLSYRASQ | IGHV3-30 | IGHJ6 | IGKV3-15 | IGKJ2 | 2739 | ARDSEYYDILT | 3941 | QQYNNWP | Philip Brouwer et al., |
| 21 | SVSSNLAWYQQKPGQAPRLLIYGAST | (Human) | (Human) | (Human) | (Human) | | GYLAPTHYYY | | PGT | 2020 |
| | RATGIPARFSGSGSGTEFTLTISSLQSE | | | | | | YYMDV | | | (https://science.science |
| | DFAVYYCQQYNNWPPGTFGQGTKLEI | | | | | | | | | mag.org/content/early/ |
| | K | | | | | | | | | 2020/06/15/science.abc |
| | | | | | | | | | | 5902) |
| CoVA1- | SYELTQPPSVSVSPGQTASITCSGDKLG | IGHV1-18 | IGHJ6 | IGLV3-1 | IGLJ3 | 2740 | ARDLVDTAM | 3942 | QAWDSST | Philip Brouwer et al., |
| 22 | DKYACWYQQKPGQSPVLVTYQDNKR | (Human) | (Human) | (Human) | (Human) | | VQTLDDYGM | | AV | 2020 |
| | PSGIPERFSGSNSGNTATLTISGTQAM | | | | | | DV | | | (https://science.science |
| | DEADYYCQAWDSSTAVFGGGTKLTVL | | | | | | | | | mag.org/content/early/ |
| | | | | | | | | | | 2020/06/15/science.abc |
| | | | | | | | | | | 5902) |
| CoVA1- | SYELTQPPSVSVSPGQTARITCSGDALP | IGHV5-51 | IGHJ4 | IGLV3-25 | IGLJ3 | 2741 | ARYYYDSRGY | 3943 | QSADSSG | Philip Brouwer et al., |
| 23 | KQYAYWYQQKPGQAPVLVIYKDSERP | (Human) | (Human) | (Human) | (Human) | | TSIDF | | TYSVV | 2020 |
| | SGIPERFSGSSSGTTVTLTISGVQAEDE | | | | | | | | | (https://science.science |
| | ADYYCQSADSSGTYSVVFGGGTKLTVL | | | | | | | | | mag.org/content/early/ |
| | | | | | | | | | | 2020/06/15/science.abc |
| | | | | | | | | | | 5902) |
| CoVA1- | DIQLTQSPSTLSASVGDRVTITCRASQS | IGHV4-39 | IGHJ6 | IGKV1-5 | IGKJ3 | 2742 | ARLNYDFWS | 3944 | QQYNSYS | Philip Brouwer et al., |
| 25 | ISSWLAWYQQKPGKAPKLLIYKASSLE | (Human) | (Human) | (Human) | (Human) | | GYYSYALYYM | | IT | 2020 |
| | SGVPSRFSGSGSGTEFTLTISSLQPDDF | | | | | | DV | | | (https://science.science |
| | ATYYCQQYNSYSITFGPGTKVDIK | | | | | | | | | mag.org/content/early/ |
| | | | | | | | | | | 2020/06/15/science.abc |
| | | | | | | | | | | 5902) |
| CoVA1- | DIVMTQSPSFLSASVGDRVTITCRASQ | IGHV4-31 | IGHJ4 | IGKV1-9 | IGKJ4 | 2743 | ARQQLDYYDS | 3945 | QQLHSY | Philip Brouwer et al., |
| 26 | GISSYLAWYQQKPGKAPKLLIYAASTL | (Human) | (Human) | (Human) | (Human) | | SGCFDY | | PLT | 2020 |
| | QSGVPSRFSGSGSGTEFTLTISSLQPED | | | | | | | | | (https://science.science |
| | FATYYCQQLHSYPLTFGGGTKVDIK | | | | | | | | | mag.org/content/early/ |
| | | | | | | | | | | 2020/06/15/science.abc |
| | | | | | | | | | | 5902) |
| CoVA1- | DVVMTQSPGTLSLSPGERATLSCRAS | IGHV4-59 | IGHJ4 | IGKV3-20 | IGKJ3 | 2744 | ARAMGSYRS | 3946 | QQYGSS | Philip Brouwer et al., |
| 27 | QNVSSSYLAWYQQKPGQAPRLLIYGA | (Human) | (Human) | (Human) | (Human) | | PFDY | | PLFT | 2020 |
| | SSRATGIPDRFSGSGSGTDFTLTISRLEP | | | | | | | | | (https://science.science |
| | EDFAVYYCQQYGSSPLFTFGPGTKVEI | | | | | | | | | mag.org/content/early/ |
| | K | | | | | | | | | 2020/06/15/science.abc |
| | | | | | | | | | | 5902) |
| CoVA2- | DIVMTQSPSSLSASVGDRVTITCRASQ | IGHV3-13 | IGHJ2 | IGKV1-39 | IGKJ4 | 2745 | ARGGDRYPV | 3947 | QQSYST | Philip Brouwer et al., |
| 01 | SISSYLNWYQQKPGKAPKLLIYAASSLQ | (Human) | (Human) | (Human) | (Human) | | GYFDL | | PPVT | 2020 |
| | SGVPSRFSGSGSGTDFTLTISSLQPEDF | | | | | | | | | (https://science.science |
| | ATYYCQQSYSTPPVTFGGGTKVEIK | | | | | | | | | mag.org/content/early/ |
| | | | | | | | | | | 2020/06/15/science.abc |
| | | | | | | | | | | 5902) |
| CoVA2- | DIVMTQSPSSLSASVGDRVTITCRASQ | IGHV4-39 | IGHJ6 | IGKV1-39 | IGKJ3 | 2746 | ARRSTSRWG | 3948 | QQSYSTH | Philip Brouwer et al., |
| 02 | SISNYLNWYQQKPGKAPKLLLYAASDL | (Human) | (Human) | (Human) | (Human) | | YYYMDV | | MST | 2020 |
| | QSGVPSRFSGSGSGTDFTLTISSLQPED | | | | | | | | | (https://science.science |
| | FATYYCQQSYSTHMSTFGQGTKVDIK | | | | | | | | | mag.org/content/early/ |
| | | | | | | | | | | 2020/06/15/science.abc |
| | | | | | | | | | | 5902) |
| CoVA2- | EIVMTQSPATLSLSPGERATLSCRASQS | IGHV3-48 | IGHJ4 | IGKV3-11 | IGKJ5 | 2747 | AREANSDFW | 3949 | QQRSNWP | 2020/06/15/science.abc |
| 03 | VSSYLAWYQQKPGQAPRLLIYDASNR | (Human) | (Human) | (Human) | (Human) | | SGYLGYFDY | | QVT | Philip Brouwer et al., |
| | ATGIPARFSGSGSGTDFTLTISSLEPEDF | | | | | | | | | 2020 |
| | AVYYCQQRSNWPQVTFGQGTRLEIK | | | | | | | | | (https://science.science |
| | | | | | | | | | | mag.org/content/early/ |
| | | | | | | | | | | 5902) |
| CoVA2- | EIVMITQSPGTLSLSPGERATLSCRASQ | IGHV3-53 | IGHJ6 | IGKV3-20 | IGKJ3 | 2748 | ARDLERAGG | 3950 | QQYGSLY | Philip Brouwer et al., |
| 04 | SVSSSYLAWYQQKPGQAPRLLIYGASS | (Human) | (Human) | (Human) | (Human) | | MDV | | T | 2020 |
| | RATGIPDRFSGSGSGTDFTLTISRLEPE | | | | | | | | | (https://science.science |
| | DFAVYYCQQYGSLYTFGQGTKVDIK | | | | | | | | | mag.org/content/early/ |
| | | | | | | | | | | 2020/06/15/science.abc |
| | | | | | | | | | | 5902); Nicholas Wu |
| | | | | | | | | | | (https://www.biorxiv.or |
| | | | | | | | | | | g/content/10.1101/202 |
| | | | | | | | | | | 0.07.26.222232v1) |

| | | | | | Not | | | | | |
|---|---|---|---|---|---|---|---|---|---|---|
| | Ab | | | Neutral- | Neutral- | | | SEQ | | SEQ |
| | or | | Doesn't | ising | ising | Protein + | | ID | | ID |
| Name | Nb | Binds to | Bind to | Vs | Vs | Epitope | Origin | NO.: | VH or VHH | NO.: |
| CoVA2- | Ab | SARS-CoV2 | SARS- | | SARS-CoV1, | S; RBD | B-cells; SARS-CoV2 | 661 | EVQLLESGAEVKKPGESLKISCKGSGYSF | 1740 |
| 05 | | | CoV1 | | SARS-CoV2 | | Human Patient | | TSYWIGWVRQMPGKGLEWMGIIYPGD | |
| | | | | | | | | | SDTRYSPSFQGQVTISADKSISTAYLQWS | |
| | | | | | | | | | SLKASDTAMYYCARHMRPSIAARPGYQ | |
| | | | | | | | | | YYMDVWGKGTRVTVSS | |
| CoVA2- | Ab | SARS-CoV2 | SARS- | SARS-CoV2 | SARS-CoV1 | S; RBD | B-cells; SARS-CoV2 | 662 | EVQLVETGGGLIQPGGSLRLSCAASGLT | 1741 |
| 07 | | | CoV1 | | | | Human Patient | | VSSNYMNWVRQAPGKGLEWVSVIYSG | |
| | | | | | | | | | GSTYYADSVKGRFTISRDNSKNTLYLQM | |
| | | | | | | | | | NSLRAEDTAVYYCAREAYGMDVWGQG | |
| | | | | | | | | | TMVTVSS | |
| CoVA2- | Ab | SARS-CoV2 | SARS- | | SARS-CoV1, | S; non- | B-cells; SARS-CoV2 | 663 | EVQLLESGGGLVQPGGSLKLSCAASGFT | 1742 |
| 10 | | | CoV1 | | SARS-CoV2 | RBD | Human Patient | | FSSYAMSWVRQAPGKGLEWVSAISGSG | |
| | | | | | | | | | SNTYYADSVKGRFTISRDNSKNTLYLQM | |
| | | | | | | | | | NSLRAEDTAVYYCAKGLRGQQLVIPTEY | |
| | | | | | | | | | FQHWGQGTLVTVSS | |
| CoVA2- | Ab | SARS-CoV2 | SARS- | SARS-CoV2 | SARS-CoV1 | S; RBD | B-cells; SARS-CoV2 | 664 | EVQLVESGAEVKKPGSSVKVSCKASGGT | 1743 |
| 11 | | | CoV1 | (weak) | | | Human Patient | | LSSYAISWVRQAPGQGLEWMGGIIPIFG | |
| | | | | | | | | | TANYAQKFQGRVTITTDESTSTAYMELSS | |
| | | | | | | | | | LRSEDTAVYYCARGPRGCSSTSCYGSYFD | |
| | | | | | | | | | YWGQGTLVTVSS | |
| CoVA2- | Ab | SARS-CoV2 | SARS- | | SARS-CoV1, | S; non- | B-cells; SARS-CoV2 | 665 | EVQLVESGGGLVKPGGSLRLSCAASGFT | 1744 |
| 12 | | | CoV1 | | SARS-CoV2 | RBD | Human Patient | | FGSYSMSWVRQAPGKGLEWVSSISRSS | |
| | | | | | | | | | SYIYNADSVRGRLTISRDNAKNSLYLQM | |
| | | | | | | | | | NSLRVEDTAVYYCARDQPLPDILTGYYT | |
| | | | | | | | | | GPLDYWGQGTLVTVSS | |
| CoVA2- | Ab | SARS-CoV2 | SARS- | SARS-CoV2 | SARS-CoV1 | S; RBD | B-cells; SARS-CoV2 | 666 | QVQLVETGGGLIQPGGSLRLSCAASGFT | 1745 |
| 13 | | | CoV1 | (weak) | | | Human Patient | | VSSNYMSWVRQAPGKGLEWVSVIYSG | |
| | | | | | | | | | GSTYYADSVKGRFTISRDNSKNTLYLQM | |
| | | | | | | | | | NSLRAEDTAVYYCARDLDTMGGMDVW | |
| | | | | | | | | | GQGTRVTVSS | |
| CoVA2- | Ab | SARS-CoV1, | | | SARS-CoV1, | S; non- | B-cells; SARS-CoV2 | 667 | QVQLVQSGAEVKKPGSSVKVSCKASGG | 1746 |
| 14 | | SARS-CoV2 | | | SARS-CoV2 | RBD | Human Patient | | TFSSYAIIWVRQAPGQGLEWMGGIIPIF | |
| | | | | | | | | | GTANYAQKFQGRVTITTDESTSTAYMEL | |
| | | | | | | | | | SSLRSEDTAVYYCARVRYYDSSGYYEDY | |
| | | | | | | | | | WGQGTLVTVSS | |
| CoVA2- | Ab | SARS-CoV2 | SARS- | SARS-CoV2 | SARS-CoV1 | S; RBD | B-cells; SARS-CoV2 | 668 | QVQLLESGGGLVQPGGSLRLSCAASGFT | 1747 |
| 15 | | | CoV1 | | | | Human Patient | | FSSYAMSWVRQAPGKGLEWASAISGSG | |
| | | | | | | | | | GSTYYADSVEGRFTISRDNSKNTLYLQM | |
| | | | | | | | | | NSLRAEDTAVYYCAKDTGYCGDDCYIKLI | |
| | | | | | | | | | RGGPDYWGQGTLVTVSS | |
| CoVA2- | Ab | SARS-CoV2 | SARS- | | SARS-CoV1, | S; RBD | B-cells; SARS-CoV2 | 669 | QVQLVQSGAEVKKPGATVKISCKVSGYT | 1748 |
| 16 | | | CoV1 | | SARS-CoV2 | | Human Patient | | FTDYYMHWVQQAPGKGLEWMGLVDP | |
| | | | | | | | | | EDGETIYAEKFQGRVTITADTSTDTAYM | |
| | | | | | | | | | ELSSLRSEDTAVYYCASSDSSGFVGSRGF | |
| | | | | | | | | | DYWGQGTRVTVSS | |
| CoVA2- | Ab | SARS-CoV2 | SARS- | | SARS-CoV1, | S; RBD | B-cells; SARS-CoV2 | 670 | QVQLVESGAEVKKPGSSVKVSCKASGGT | 1749 |
| 17 | | | CoV1 | | SARS-CoV2 | | Human Patient | | FSSYGINWVRQAPGQGLEWMGGIIPIF | |
| | | | | | | | | | GTANYAQKFQGRVTITTDESTSTAYMEL | |
| | | | | | | | | | SSLRSEDTAVYYCASFGDDSGDEGVRW | |
| | | | | | | | | | GQGTLVTVSS | |
| CoVA2- | Ab | SARS-CoV1, | | SARS-CoV2 | SARS-CoV1 | S; non- | B-cells; SARS-CoV2 | 671 | EVQLVQSGAEVKKPGSSVKVSCKASGGT | 1750 |
| 18 | | SARS-CoV2 | | | | RBD | Human Patient | | FSSYAISWVRQAPGQGLEWMGGIIPIFG | |
| | | | | | | | | | TTNYAQKFQGRVTITTDESTSTAYMELSS | |
| | | | | | | | | | LRSEDTAVYYCARVYSYDSSGYYLEYWG | |
| | | | | | | | | | QGTRVTVSS | |
| CoVA2- | Ab | SARS-CoV2 | SARS- | | SARS-CoV1, | S; RBD | B-cells; SARS-CoV2 | 672 | EVQLVESGGGLIQPGGSLRLSCAASGFT | 1751 |
| 20 | | | CoV1 | | SARS-CoV2 | | Human Patient | | VSSNYMSWVRQAPGKGLEWVSVIYSG | |
| | | | | | | | | | GSTYYADSVKGRFTISRDNSKNTLYLQM | |
| | | | | | | | | | NSLRAEDTAVYYCASPLLLTPPDYYYYMD | |
| | | | | | | | | | VWGKGTMVTVSS | |

| | | | | | | SEQ | | SEQ | | |
|---|---|---|---|---|---|---|---|---|---|---|
| | | Heavy V | Heavy J | Light V | Light J | ID | | ID | | |
| Name | VL | Gene | Gene | Gene | Gene | NO.: | CDRH3 | NO.: | CDRL3 | Sources |
| CoVA2- | DIQMTQSPSSLSASVGDRVTITCQASQ | IGHV5-51 | IGHJ6 | IGKV1-33 | IGKJ4 | 2749 | ARHMRPSIAA | 3951 | QQYDNLPL | Philip Brouwer et al., |
| 05 | DISNYLNWYQQKPGKAPKLLIYDASNL | (Human) | (Human) | (Human) | (Human) | | RPGYQYYMD | | T | 2020 |
| | ETGVPSRFSGSGSGTDFTFTISSLQPED | | | | | | V | | | (https://science.science |
| | IATYYCQQYDNLPLTFGGGTKLEIK | | | | | | | | | mag.org/content/early/ |
| | | | | | | | | | | 2020/06/15/science.abc |
| | | | | | | | | | | 5902) |
| CoVA2- | EIVLTQSPGTLSLSPGERATLSCRASQS | IGHV3-53 | IGHJ6 | IGKV3-20 | IGKJ3 | 2750 | AREAYGMDV | 3952 | QQYGSSP | Philip Brouwer et al., |
| 07 | VSSSYLAWYQQKPGQAPRLLIYGASSR | (Human) | (Human) | (Human) | (Human) | | | | GT | 2020 |
| | ATGIPDRFSGSWSGTDFTLTISRLEPED | | | | | | | | | (https://science.science |
| | FAVYYCQQYGSSPGTFGQGTKVDIK | | | | | | | | | mag.org/content/early/ |
| | | | | | | | | | | 2020/06/15/science.abc |
| | | | | | | | | | | 5902) |
| CoVA2- | DIVMTQSPGTLSLSPGERATLSCRASQ | IGHV3-23 | IGHJ1 | IGKV3-20 | IGKJ4 | 2751 | AKGLRGQQL | 3953 | QQYGSSLL | Philip Brouwer et al., |
| 10 | SVSSSYLAWYQQKPGQAPRLLIYGASS | (Human) | (Human) | (Human) | (Human) | | VIPTEYFQH | | T | 2020 |
| | RATGIPDRFSGSGSGTDFTLTISRLEPE | | | | | | | | | (https://science.science |
| | DFAVYYCQQYGSSLLTFGGGTKVEIK | | | | | | | | | mag.org/content/early/ |
| | | | | | | | | | | 2020/06/15/science.abc |
| | | | | | | | | | | 5902) |
| CoVA2- | DIQLTQSPGTLSLSPGERATLSCRASQS | IGHV1-69 | IGHJ4 | IGKV3-20 | IGKJ4 | 2752 | ARGPRGCSST | 3954 | QQYGSSPR | Philip Brouwer et al., |
| 11 | VSSSYLAWYQQKPGQAPRLLIYGASSR | (Human) | (Human) | (Human) | (Human) | | SCYGSYFDY | | LT | 2020 |
| | ATGIPDRFSGSGSGTDFTLTISRLEPED | | | | | | | | | (https://science.science |
| | FAVYYCQQYGSSPRLTFGGGTKVDIK | | | | | | | | | mag.org/content/early/ |
| | | | | | | | | | | 2020/06/15/science.abc |
| | | | | | | | | | | 5902) |
| CoVA2- | EIVLTQSPATLSVSPGERATLSCRASQS | IGHV3-21 | IGHJ4 | IGKV3-15 | IGKJ1 | 2753 | ARDQPLPDIL | 3955 | QQYNNWP | Philip Brouwer et al., |
| 12 | VSSSLAWYQQKPGQAPRLLIYAASTRA | (Human) | (Human) | (Human) | (Human) | | TGYYTGPLDY | | PWT | 2020 |
| | TGIPARFSGSGSGTEFTLTISSLQSEDFA | | | | | | | | | (https://science.science |
| | VYYCQQYNNWPPWTFGQGTKLEIK | | | | | | | | | mag.org/content/early/ |
| | | | | | | | | | | 2020/06/15/science.abc |
| | | | | | | | | | | 5902) |
| CoVA2- | EIVMTQSPGTLSLSPGERATLSCRASQ | IGHV3-53 | IGHJ6 | IGKV3-20 | IGKJ1 | 2754 | ARDLDTMGG | 3956 | QQYGSSP | Philip Brouwer et al., |
| 13 | SVSSSYLAWYQQKPGQAPRLLIYGASS | (Human) | (Human) | (Human) | (Human) | | MDV | | GT | 2020 |
| | RATGIPDRFSGSGSGTDFTLTISRLEPE | | | | | | | | | (https://science.science |
| | DFAVYYCQQYGSSPGTFGQGTKVEIK | | | | | | | | | mag.org/content/early/ |
| | | | | | | | | | | 2020/06/15/science.abc |
| | | | | | | | | | | 5902) |
| CoVA2- | EIVLTQSPATLSLSPGERATLSCRASQS | IGHV1-69 | IGHJ4 | IGKV3-11 | IGKJ1 | 2755 | ARVRYYDSSG | 3957 | QQRSNWP | Philip Brouwer et al., |
| 14 | VSSYLAWYQQEPGQAPRLLIYDASNR | (Human) | (Human) | (Human) | (Human) | | YYEDY | | PMYT | 2020 |
| | ATGIPARFSGSGSGTDFTLTISSLEPEDF | | | | | | | | | (https://science.science |
| | AVYYCQQRSNWPPMYTFGQGTKVEI | | | | | | | | | mag.org/content/early/ |
| | K | | | | | | | | | 2020/06/15/science.abc |
| | | | | | | | | | | 5902) |
| CoVA2- | DIVMTQSPLSLPVTLGQPASISCRSSQS | IGHV3-23 | IGHJ4 | IGKV2-30 | IGKJ2 | 2756 | AKDTGYCGD | 3958 | MQGTHW | Philip Brouwer et al., |
| 15 | LVYSDGNTFLNWFQQRPGQSPRRLIY | (Human) | (Human) | (Human) | (Human) | | DCYIKLIRGG | | PRT | 2020 |
| | QVSNRDSGVPDRFSGSGSGTDFTLKIS | | | | | | PDY | | | (https://science.science |
| | RVEAEDVGVYYCMQGTHWPRTFGQ | | | | | | | | | mag.org/content/early/ |
| | GTKLEIK | | | | | | | | | 2020/06/15/science.abc |
| | | | | | | | | | | 5902) |
| CoVA2- | DIQLTQSPSSLSASVGDRVTITCRASQG | IGHV1-69 | IGHJ4 | IGKV1-17 | IGKJ1 | 2757 | ASSDSSGFVG | 3959 | LQHNSYPP | Philip Brouwer et al., |
| 16 | IRNDLGWYQQKPGKAPKRLIYAASSL | (Human) | (Human) | (Human) | (Human) | | SRGFDY | | L | 2020 |
| | QSGVPSRFSGSGSGTEFTLTISSLQPED | | | | | | | | | (https://science.science |
| | FATYYCLQHNSYPPLFGQGTKVEIK | | | | | | | | | mag.org/content/early/ |
| | | | | | | | | | | 2020/06/15/science.abc |
| | | | | | | | | | | 5902) |
| CoVA2- | EIVMTQSPATLSLSPGERATLSCRASQS | IGHV1-69 | IGHJ4 | IGKV3-11 | IGKJ1 | 2758 | ASFGDDSGDE | 3960 | QQRSNWP | Philip Brouwer et al., |
| 17 | VSSYLAWYQQKPGQAPRLLIYDASNR | (Human) | (Human) | (Human) | (Human) | | GVR | | PYT | 2020 |
| | ATGIPARFSGSGSGTDFTLTISSLEPEDF | | | | | | | | | (https://science.science |
| | AVYYCQQRSNWPPYTFGQGTKVEIK | | | | | | | | | mag.org/content/early/ |
| | | | | | | | | | | 2020/06/15/science.abc |
| | | | | | | | | | | 5902) |
| CoVA2- | EIVLTQSPATLSLSPGERATLSCRASQS | IGHV1-69 | IGHJ4 | IGKV3-11 | IGKJ5 | 2759 | ARVYSYDSSG | 3961 | QQRSNWP | Philip Brouwer et al., |
| 18 | VSSYLAWYQQKPGQAPRLLIYDASNR | (Human) | (Human) | (Human) | (Human) | | YYLEY | | PSIT | 2020 |
| | ATGIPARFSGSGSGTDFTLTISSLEPEDF | | | | | | | | | (https://science.science |
| | AVYYCQQRSNWPPSITFGQGTRLEIK | | | | | | | | | mag.org/content/early/ |
| | | | | | | | | | | 2020/06/15/science.abc |
| | | | | | | | | | | 5902) |
| CoVA2- | DVVMTQSPSSLSVSVGDRVTITCRASQ | IGHV3-53 | IGHJ6 | IGKV1-17 | IGKJ1 | 2760 | ASPLLLTPPD | 3962 | LQHNSYL | Philip Brouwer et al., |
| 20 | GIRNDLGWYQQKPGKAPKRLIYAASSL | (Human) | (Human) | (Human) | (Human) | | YYYYMDV | | WT | 2020 |
| | QSGVPSRFSGSGSGTEFTLTISSLQPED | | | | | | | | | (https://science.science |
| | FATYYCLQHNSYLWTFGQGTKLEIK | | | | | | | | | mag.org/content/early/ |
| | | | | | | | | | | 2020/06/15/science.abc |
| | | | | | | | | | | 5902) |

| | | | | | Not | | | | | |
|---|---|---|---|---|---|---|---|---|---|---|
| | Ab | | | Neutral- | Neutral- | | | SEQ | | SEQ |
| | or | | Doesn't | ising | ising | Protein + | | ID | | ID |
| Name | Nb | Binds to | Bind to | Vs | Vs | Epitope | Origin | NO.: | VH or VHH | NO.: |
| CoVA2- | Ab | SARS-CoV2 | SARS- | | SARS-CoV1, | S; non- | B-cells; SARS-CoV2 | 673 | EVQLVESGPGLVKPSETLSLTCTVSGGSI | 1752 |
| 22 | | | CoV1 | | SARS-CoV2 | RBC | Human Patient | | SSYYWSWIRQPAGKGLEWIGRIYTSGST | |
| | | | | | | | | | NYNPSLKSRVTMSVDTSKNQFSLKLSSV | |
| | | | | | | | | | TAADTAVYYCARWKYNDRFDYWGQGT | |
| | | | | | | | | | RVTVSS | |
| CoVA2- | Ab | SARS-CoV2 | SARS- | | SARS-CoV1, | S; RBD | B-cells; SARS-CoV2 | 674 | EVQLVESGAEVKKPGSSVKVSCKASGGT | 1753 |
| 23 | | | CoV1 | | SARS-CoV2 | | Human Patient | | FSSYAISWVRQAPGQGLEWMGGIIPIFG | |
| | | | | | | | | | TANYAQKFQGRVTITTDESTSTAYMELSS | |
| | | | | | | | | | LRSEDTAVYYCARGPRYCSSTSCYAGVYF | |
| | | | | | | | | | DYWGQGTRVTVSS | |
| CoVA2- | Ab | SARS-CoV2 | SARS- | | SARS-CoV1, | S; RBD | B-cells; SARS-CoV2 | 675 | EVQLVQSGAEVKKPGESLRISCKGSGYSF | 1754 |
| 24 | | | CoV1 | | SARS-CoV2 | | Human Patient | | TSYWISWVRQMPGKGLEWMGRIDPSD | |
| | | | | | | | | | SYTNYSPSFQGHVTISADKSISTAYLQWS | |
| | | | | | | | | | SLKASDTAMYYCARPNPAGGYDSSGWV | |
| | | | | | | | | | DAFDIWGQGTRVTVSS | |
| CoVA2- | Ab | SARS-CoV2 | SARS- | | SARS-CoV1, | S; non- | B-cells; SARS-CoV2 | 676 | EVQLVESGAEVKKPGASVKVSCKVSGYT | 1755 |
| 25 | | | CoV1 | | SARS-CoV2 | RBC | Human Patient | | LPELSMHWVRQTPGKGLEWMGGFDP | |
| | | | | | | | | | EDGETIYAQKFQGRVTMTEDTSTDTAY | |
| | | | | | | | | | MELSSLRSEDTAVYYCATGPTIAAAATN | |
| | | | | | | | | | WFDPGGQGTLVTVSS | |
| CoVA2- | Ab | SARS-CoV2 | SARS- | | SARS-CoV1, | S; non- | B-cells; SARS-CoV2 | 577 | EVQLVESGGGLVKPGGSLRLSCAASGFT | 1756 |
| 26 | | | CoV1 | | SARS-CoV2 | RBD | Human Patient | | FSNAWMSWVRQAPGKGLEWVGRIKSK | |
| | | | | | | | | | TDGGTTDYAAPVKGRFTISRDDSKNTLY | |
| | | | | | | | | | LQMNSLKTEDTAVYYCTTDRGDSYGYYY | |
| | | | | | | | | | CMDVWGKGTRVTVSS | |
| CoVA2- | Ab | SARS-CoV2 | SARS- | | SARS-CoV1, | S; non- | B-cells; SARS-CoV2 | 678 | EVQLVESGGGVVQPGRSLRLSCAASGFT | 1757 |
| 28 | | | CoV1 | | SARS-CoV2 | RBC | Human Patient | | FSSYGMHWVRQAPGKGLEWVAVIWY | |
| | | | | | | | | | DGSNKYYADSVKGRFTISRDNSKNTLYL | |
| | | | | | | | | | QMDSLRAEDTAMYYCAKDKAPPCSSG | |
| | | | | | | | | | WYYFDYWGQGTLVTVSS | |
| CoVA2- | Ab | SARS-CoV2 | SARS- | SARS-CoV2 | SARS-CoV1 | S; RBD | B-cells; SARS-CoV2 | 679 | EVQLVESGGGVVQPGRSLRLSCAASGFT | 1758 |
| 29 | | | CoV1 | | | | Human Patient | | FSSYTMHWVRQAPGKGLEWVAVISYD | |
| | | | | | | | | | GSNKYYADSVKGRFTISRDNSKNTLYLQ | |
| | | | | | | | | | MNSLRAEDTAVYYCASLPVVPAAIGPLP | |
| | | | | | | | | | AFDIWGQGTMVTVSS | |
| CoVA2- | Ab | SARS-CoV2 | SARS- | | SARS-CoV1, | S; non- | B-cells; SARS-CoV2 | 680 | EVQLVESGPGLVKPSQTLSLTCTVSGGSI | 1759 |
| 30 | | | CoV1 | | SARS-CoV2 | RBD | Human Patient | | SSGDYYWSWIRQPPGKGLEWIGYIYYSG | |
| | | | | | | | | | STYYNPSLKSRVTISVDTSKNQFSLKLSSV | |
| | | | | | | | | | TAADTAVYYCARGVEDPVVPAAIPWCW | |
| | | | | | | | | | FDPWGQGTRVTVSS | |
| CoVA2- | Ab | SARS-CoV2 | SARS- | | SARS-CoV1, | S; RBD | B-cells; SARS-CoV2 | 681 | EVQLVESGVEVKKPGASVKVSCKAFGYT | 1760 |
| 31 | | | CoV1 | | SARS-CoV2 | | Human Patient | | FTGQDMHWVRQAPGQGLEWMGWIN | |
| | | | | | | | | | PSSAGTNYAQKFQGRVTMTRDTSISTAY | |
| | | | | | | | | | MELSRLRSDDTSVYYCRKMLTIFGKVNQ | |
| | | | | | | | | | TMLLISGAKGQWSPSLQWGQGTMVTV | |
| | | | | | | | | | SS | |
| CoVA2- | Ab | SARS-CoV1, | | | SARS-CoV1, | S; RBD | B-cells; SARS-CoV2 | 682 | EVQLVESGAEVKKPGSSVKVSCKASGGT | 1761 |
| 32 | | SARS-CoV2 | | | SARS-CoV2 | | Human Patient | | FSSYAISWVRQAPGQGLEWMGGIIPIFG | |
| | | | | | | | | | TANYAQKFQGRATITTDESTSTAYMELSS | |
| | | | | | | | | | LGSEDTAVYYCARTHSYDNSGQYFDYW | |
| | | | | | | | | | GQGTMVTVSS | |
| CoVA2- | Ab | SARS-CoV2 | SARS- | | SARS-CoV1, | S; non- | B-cells; SARS-CoV2 | 683 | QVQLVQSGAEVKKPGESLRISCKGSGYS | 1762 |
| 33 | | | CoV1 | | SARS-CoV2 | RBC | Human Patient | | FTSHWISWVRQMPGKGLEWMGRIDPS | |
| | | | | | | | | | DSYTNYSPSFQGHVTISADKSISTAYLQW | |
| | | | | | | | | | SSLKASDTAMYYCARLKVITIFGVVRDDY | |
| | | | | | | | | | GMDVWGQGTTVTVSS | |
| CoVA2- | Ab | SARS-CoV2 | SARS- | | SARS-CoV1, | S; non- | B-cells; SARS-CoV2 | 684 | QVQLVESGGGVVQPGRSLRLSCAASGF | 1763 |
| 34 | | | CoV1 | | SARS-CoV2 | RBC | Human Patient | | TFSSYAMHWVRQAPGKGLEWVAVISY | |
| | | | | | | | | | DGSNKYYADSVKGRFTISRDNSKNTLYL | |
| | | | | | | | | | QMNSLRAEDTAVYYCARSASGSYYGAF | |
| | | | | | | | | | DYWGQGTLVTVSS | |

| | | | | | | SEQ | | SEQ | | |
|---|---|---|---|---|---|---|---|---|---|---|
| | | Heavy V | Heavy J | Light V | Light J | ID | | ID | | |
| Name | VL | Gene | Gene | Gene | Gene | NO.: | CDRH3 | NO.: | CDRL3 | Sources |
| CoVA2- | AIRMTQSPSSLSASVGDRVTITCQASQ | IGHV4-4 | IGHJ4 | IGKV1-33 | IGKJ5 | 2761 | ARGPRYCSST | 3963 | QQYDNLPI | Philip Brouwer et al., |
| 22 | DISNYLNWYQQKPGKAPKLLIYDASNL | (Human) | (Human) | (Human) | (Human) | | SCYAGVYFDY | | T | 2020 |
| | ETGVPSRFSGSGSGTDFTFTISSLQPED | | | | | | | | | (https://science.science |
| | IATYYCQQYDNLPITFGQGTRLEIK | | | | | | | | | mag.org/content/early/ |
| | | | | | | | | | | 2020/06/15/science.abc |
| | | | | | | | | | | 5902) |
| CoVA2- | EIVLTQSPGTLSLSPGERATLSCRASQS | IGHV1-69 | IGHJ4 | IGKV3-20 | IGKJ4 | 2762 | ARDGFGDVE | 3964 | QQYGSSP | Philip Brouwer et al., |
| 23 | VSSSYLAWYQQKPGQAPRLLIYGASSR | (Human) | (Human) | (Human) | (Human) | | EMATIKDAFD | | GVT | 2020 |
| | ATGIPDRFSGSGSGTDFTLTISRLEPED | | | | | | I | | | (https://science.science |
| | FAVYYCQQYGSSPGVTFGGGTKLEIK | | | | | | | | | mag.org/content/early/ |
| | | | | | | | | | | 2020/06/15/science.abc |
| | | | | | | | | | | 5902) |
| CoVA2- | AIRMTQSPSSLSASVGDRVTITCRASQ | IGHV5-10- | IGHJ3 | IGKV1-39 | IGKJ2 | 2763 | ARPNPAGGY | 3965 | QQSYSTPQ | Philip Brouwer et al., |
| 24 | SISSYLNWYQQKPGKAPKLLIYAASSLQ | 1 | (Human) | (Human) | (Human) | | DSSGWVDAF | | T | 2020 |
| | SGVPSRFSGSGSGTDFTLTISSLQPEDF | (Human) | | | | | DI | | | (https://science.science |
| | ATYYCQQSYSTPQTFGQGTKLEIK | | | | | | | | | mag.org/content/early/ |
| | | | | | | | | | | 2020/06/15/science.abc |
| | | | | | | | | | | 5902) |
| CoVA2- | QPVLTQPASVSGSPGQSITISCTGTSSD | IGHV1-24 | IGHJ5 | IGLV2-14 | IGLJ3 | 2764 | ATGPTIAAAA | 3966 | SSYTSSST | Philip Brouwer et al., |
| 25 | VGGYNYVSWYQQHPGKAPKLMIYDV | (Human) | (Human) | (Human) | (Human) | | TNWFDP | | WV | 2020 |
| | SNRPSGVSNRFSGSRSGDTASLTISGL | | | | | | | | | (https://science.science |
| | QAEDEADYYCSSYTSSSTWVFGGGTKL | | | | | | | | | mag.org/content/early/ |
| | TVL | | | | | | | | | 2020/06/15/science.abc |
| | | | | | | | | | | 5902) |
| CoVA2- | QLVLTQPPSVSVSPGQTASITCSGDKL | IGHV3-15 | IGHJ6 | IGLV3-1 | IGLJ3 | 2765 | TTDRGDSYGY | 3967 | QAWDSST | Philip Brouwer et al., |
| 26 | GDKYACWYQQKPGQSPVLVIYQDSKR | (Human) | (Human) | (Human) | (Human) | | YYCMDV | | AVV | 2020 |
| | PSGIPERFSGSNSGNTATLTISGTQAM | | | | | | | | | (https://science.science |
| | DEADYYCQAWDSSTAVVFGGGTKLTV | | | | | | | | | mag.org/content/early/ |
| | L | | | | | | | | | 2020/06/15/science.abc |
| | | | | | | | | | | 5902) |
| CoVA2- | EIVMTQSPATLSVSPGERATLSCRASQ | IGHV3-33 | IGHJ4 | IGKV3-15 | IGKJ5 | 2766 | AKDKAPPCSS | 3968 | QQYNYWP | Philip Brouwer et al., |
| 28 | SVSSNLAWYQHKPGQAPRLLIYGASTR | (Human) | (Human) | (Human) | (Human) | | GWYYFDY | | LIT | 2020 |
| | ATGIPARFSGSGSGTEFTLTISSLQSEDF | | | | | | | | | (https://science.science |
| | AVYYCQQYNYWPLITFGQGTRLEIK | | | | | | | | | mag.org/content/early/ |
| | | | | | | | | | | 2020/06/15/science.abc |
| | | | | | | | | | | 5902) |
| CoVA2- | DIVMTQSPSSLSASVGDRVTITCRASQ | IGHV3-30 | IGHJ3 | IGKV1-39 | IGKJ1 | 2767 | ARGVEDPVV | 3969 | QQSYSTPR | Philip Brouwer et al., |
| 29 | SISSYLNWYQQKPGKAPKLLIYAASSLQ | (Human) | (Human) | (Human) | (Human) | | PAAIPWCWF | | T | 2020 |
| | SGVPSRFSGSGSGTDFTLTISSLQPEDF | | | | | | DP | | | (https://science.science |
| | ATYYCQQSYSTPRTFGQGTKVEIK | | | | | | | | | mag.org/content/early/ |
| | | | | | | | | | | 2020/06/15/science.abc |
| | | | | | | | | | | 5902) |
| CoVA2- | QSVLTQPPSVSVAPGQTARITCGGNNI | IGHV4-30- | IGHJ5 | IGLV3-21 | IGLJ3 | 2768 | ASLPVVPAAI | 3970 | QVWASSS | Philip Brouwer et al., |
| 30 | GSKSVHWYQQKPGQAPVLVVYDDSD | 4 | (Human) | (Human) | (Human) | | GPLPAFDI | | VV | 2020 |
| | RPSGIPERFSGSNSGNTATLTISRVEAG | (Human) | | | | | | | | (https://science.science |
| | DEADYYCQVWASSSVVFGGGTKLTVL | | | | | | | | | mag.org/content/early/ |
| | | | | | | | | | | 2020/06/15/science.abc |
| | | | | | | | | | | 5902) |
| CoVA2- | DIVMTQTPLSLSVTPGQPASISCKSGQ | IGHV1-2 | IGHJ3 | IGKV2D-29 | IGKJ1 | 2769 | RKMLTIFGKV | 3971 | MQSIQLPP | Philip Brouwer et al., |
| 31 | SLLHSDGKTYLYWYLQKPGQPPQLLIY | (Human) | (Human) | (Human) | (Human) | | NQTMLLISGA | | T | 2020 |
| | EVSNRFSGVPDRFSGSGSGTDFTLKISR | | | | | | KGQ | | | (https://science.science |
| | VEAEDVGVYYCMQSIQLPPTFGQGTK | | | | | | | | | mag.org/content/early/ |
| | VEIK | | | | | | | | | 2020/06/15/science.abc |
| | | | | | | | | | | 5902) |
| CoVA2- | DIVMTQSPATLSLSPGERATLSCRASQ | IGHV1-69 | IGHJ4 | IGKV3-11 | IGKJ4 | 2770 | ARTHSYDNSG | 3972 | QQRSNWP | Philip Brouwer et al., |
| 32 | SVSSFLAWYQQKPGQAPRLLIYDASNR | (Human) | (Human) | (Human) | (Human) | | QYFDY | | PRLT | 2020 |
| | ATGIPARFSGSGSGTDFTLTISSLEPEDF | | | | | | | | | (https://science.science |
| | AVYYCQQRSNWPPRLTFGGGTKVDIK | | | | | | | | | mag.org/content/early/ |
| | | | | | | | | | | 2020/06/15/science.abc |
| | | | | | | | | | | 5902) |
| CoVA2- | QSALTQPASVSGSPGQSITISCTGTSSD | IGHV5-10- | IGHJ6 | IGLV2-23 | IGLJ3 | 2771 | ARLKVITIFGV | 3973 | CSYAGSV | Philip Brouwer et al., |
| 33 | VGSYNLVSWYQQHPGKAPKLMIYDSS | 1 | (Human) | (Human) | (Human) | | VRDDYGMDV | | | 2020 |
| | KRPSGVSNRFSGSKSGNTASLTISGLQ | (Human) | | | | | | | | (https://science.science |
| | AEDEADYYCCSYAGSVFGGGTKLTVL | | | | | | | | | mag.org/content/early/ |
| | | | | | | | | | | 2020/06/15/science.abc |
| | | | | | | | | | | 5902) |
| CoVA2- | QTVVTQPASVSGSPGQSITISCTGTSSD | IGHV3-30 | IGHJ4 | IGLV2-14 | IGLJ1 | 2772 | ARSASGSYYG | 3974 | SSYTSSSTL | Philip Brouwer et al., |
| 34 | VGGYNYVSWYQQHPGKAPKLMIYDV | (Human) | (Human) | (Human) | (Human) | | AFDY | | GLYV | 2020 |
| | SNRPSGVSNRFSGSKSGNTASLTISGL | | | | | | | | | (https://science.science |
| | QAEDEADYYCSSYTSSSTLGLYVFGTGT | | | | | | | | | mag.org/content/early/ |
| | KVTVL | | | | | | | | | 2020/06/15/science.abc |
| | | | | | | | | | | 5902) |

| | | | | | Not | | | | | |
|---|---|---|---|---|---|---|---|---|---|---|
| | Ab | | | Neutral- | Neutral- | | | SEQ | | SEQ |
| | or | | Doesn't | ising | ising | Protein + | | ID | | ID |
| Name | Nb | Binds to | Bind to | Vs | Vs | Epitope | Origin | NO.: | VH or VHH | NO.: |
| CoVA2- | Ab | SARS-CoV2 | SARS- | | SARS-CoV1, | S; non- | B-cells; SARS-CoV2 | 685 | EVQLVESGAEVKKPGASVKVSCKVSGYT | 1764 |
| 37 | | | CoV1 | | SARS-CoV2 | RBD | Human Patient | | LPELSMHWVRQAPGKGLDWMGGFDP | |
| | | | | | | | | | EDGETIYAQKFQGRVTMTEDTSTDTAY | |
| | | | | | | | | | MELSSLRSEDTAVYYCATSPAVMSVGW | |
| | | | | | | | | | VDPWGQGTLVTVSS | |
| CoVA2- | Ab | SARS-CoV2 | SARS- | | SARS-CoV1, | S; non- | B-cells; SARS-CoV2 | 686 | QVQLQQSGPGLVKPSETLPLTCTVSGGS | 1765 |
| 38 | | | CoV1 | | SARS-CoV2 | RBD | Human Patient | | ISSSSYYWGWIRQPPGKGLEWIGSVFYS | |
| | | | | | | | | | GSTYYNPSLKSRVTISVDTSKNQLSLKLSS | |
| | | | | | | | | | VTAADTAVYYCARQVRQWLEDDAFDI | |
| | | | | | | | | | WGQGTMVTVSS | |
| CoVA2- | Ab | SARS-CoV2 | SARS- | | SARS-CoV1, | S; RBD | B-cells; SARS-CoV2 | 687 | QVQLVETGGGLIQPGGSLRLSCAASGFT | 1766 |
| 39 | | | CoV1 | | SARS-CoV2 | | Human Patient | | VSSNYMSWVRQAPGKGLEWVSVIYTG | |
| | | | | | | | | | GTTYYADSVKGRFTISRDNSKNTLYLQM | |
| | | | | | | | | | NSLRAEDTAVYYCARAHVDTAMVESGA | |
| | | | | | | | | | FDIWGQGTRVTVSS | |
| CoVA2- | Ab | SARS-CoV2 | SARS- | | SARS-CoV1, | S; non- | B-cells; SARS-CoV2 | 688 | QVQLQESGPGLVKPSGTLSLTCAVSGGS | 1767 |
| 40 | | | CoV1 | | SARS-CoV2 | RBD | Human Patient | | ISSSNWWSWVRQPPGKGLEWIGEIYHS | |
| | | | | | | | | | GSSNYNPSLKSRVTISVDKSKNQFSLKLN | |
| | | | | | | | | | SVTAADTAVYYCAGRYCSGGRCGWFDP | |
| | | | | | | | | | WGQGTLVTVSS | |
| CoVA2- | Ab | SARS-CoV2 | SARS- | | SARS-CoV1, | S; non- | B-cells; SARS-CoV2 | 689 | EVQLVESGGGLVKPGGSLRLSCSASGFT | 1768 |
| 41 | | | CoV1 | | SARS-CoV2 | RBD | Human Patient | | FSNYNMDWVRQAPGKGLEWVSSISSSS | |
| | | | | | | | | | SYIYLADSVKGRFTISRDNAKNSLYLQMN | |
| | | | | | | | | | SLRAEDTAVYYCARVQKDIVVVPVALAD | |
| | | | | | | | | | YYYYGMDVWGQGTTVTVSS | |
| CoVA2- | Ab | SARS-CoV2 | SARS- | | SARS-CoV1, | S; non- | B-cells; SARS-CoV2 | 690 | QVQLVQPGAEVKKPGASVKVSCKASGY | 1769 |
| 43 | | | CoV1 | | SARS-CoV2 | RBD | Human Patient | | TFTSYGISWVRQAPGQGLEWMGWISA | |
| | | | | | | | | | YNGDTNYAQKLQGRVTMTTDTSTSTAY | |
| | | | | | | | | | MELRSLKSDDTAVYYCARFDYGYPYSSW | |
| | | | | | | | | | SVLSIDYWGQGTLVTVSS | |
| CoVA2- | Ab | SARS-CoV1, | | | SARS-CoV1, | S; RBD | B-cells; SARS-CoV2 | 691 | EVQLVESGGGVVQPGRSLRLSCAASGFT | 1770 |
| 44 | | SARS-CoV2 | | | SARS-CoV2 | | Human Patient | | FSSYAMHWVRQAPGKGLEWVAVISYD | |
| | | | | | | | | | GSYKYYADSVKGRFTISRDNSKNTLYLQ | |
| | | | | | | | | | MNSLTAEDTAVYYCAREGSRQWLVIYF | |
| | | | | | | | | | DYWGQGTLVTVSS | |
| CoVA2- | Ab | SARS-CoV2 | | | SARS-CoV1, | S; RBD | B-cells; SARS-CoV2 | 692 | EVQLLESGAEVKKPGASVKISCKASGYTF | 1771 |
| 45 | | | | | SARS-CoV2 | | Human Patient | | TGYYMHWVRQAPGQGLEWMGWINP | |
| | | | | | | | | | NSGGTNYAQKFQGRVTMTRDTSISTAY | |
| | | | | | | | | | MELSRLRSDDTAVYYCARGDGDYYDSS | |
| | | | | | | | | | GYYRPTLYNWLDPWGQGTRVTVSS | |
| CoVA2- | Ab | SARS-CoV2 | SARS- | | SARS-CoV1, | S; RBD | B-cells; SARS-CoV2 | 693 | QVQLQESGPGLVKPSETLSLTCTASGGSI | 1772 |
| 46 | | | CoV1 | | SARS-CoV2 | | Human Patient | | SSSSYYWGWIRQPPGKGLEWIGSIYYSG | |
| | | | | | | | | | STYYNPSLKSRVTISVDTSKNQFSLKLSSV | |
| | | | | | | | | | TAADTAVYYCARHPSGLYQLLNWGQGT | |
| | | | | | | | | | LVTVSS | |
| CoVA2- | Ab | SARS-CoV2 | SARS- | | SARS-CoV1, | S; non- | B-cells; SARS-CoV2 | 694 | EVQLVESGGGLVQPGRSLRLSCAASGFT | 1773 |
| 47 | | | CoV1 | | SARS-CoV2 | RBD | Human Patient | | FDDYAMHWVRQAPGKGLEWVSGISW | |
| | | | | | | | | | NSGSIGYADSVKGRFTISRDSAKNSLYLQ | |
| | | | | | | | | | MNSLRAEDTALYYCAKVATYYYDRSGYY | |
| | | | | | | | | | YGGALDYWGQGTLVTVSS | |
| CoVA3- | Ab | SARS-CoV1, | | | SARS-CoV1, | S; non- | B-cells; SARS-CoV2 | 695 | EVQLVESGPGLVKPSETLSLTCTVSGGSI | 1774 |
| 01 | | SARS-CoV2 | | | SARS-CoV2 | RBC | Human Patient | | SSYYWSWIRQPPGKGLEWIGYIYYSGST | |
| | | | | | | | | | NYNPSLKSRVTISVDTSKNQFSLKLSSVTA | |
| | | | | | | | | | ADTAVYYCARGPAATYYYYMDVWGKG | |
| | | | | | | | | | TRVTVSS | |
| CoVA3- | Ab | SARS-CoV1, | | | SARS-CoV1, | S; non- | B-cells; SARS-CoV2 | 696 | EVQLVESGGGLVQPGGSLRLSCAASGFT | 1775 |
| 03 | | SARS-CoV2 | | | SARS-CoV2 | RBD | Human Patient | | FSSYAMSWVRQAPGKGLEWVSTISGSG | |
| | | | | | | | | | GNTYYADSVKGRFTISRDNSKNTLYLQM | |
| | | | | | | | | | NSLRAEDTAVYYCAKEIAVAGCFDYWG | |
| | | | | | | | | | QGTLVTVSS | |

| | | | | | | SEQ | | SEQ | | |
|---|---|---|---|---|---|---|---|---|---|---|
| | | Heavy V | Heavy J | Light V | Light J | ID | | ID | | |
| Name | VL | Gene | Gene | Gene | Gene | NO.: | CDRH3 | NO.: | CDRL3 | Sources |
| CoVA2- | QSVLTQPPSVSGAPGQRVTISCTGSSS | IGHV1-24 | IGHJ5 | IGLV1-40 | IGLJ3 | 2773 | ATSPAVMSV | 3975 | QSYDSSLS | Philip Brouwer et al., |
| 37 | NIGAGYDVHWYQQLPGTAPKVLIYDN | (Human) | (Human) | (Human) | (Human) | | GWVDP | | GSV | 2020 |
| | NNRPSGVPDRFSGSKSGTSASLAITGL | | | | | | | | | (https://science.science |
| | QAEDEADYYCQSYDSSLSGSVFGGGT | | | | | | | | | mag.org/content/early/ |
| | KLTVL | | | | | | | | | 2020/06/15/science.abc |
| | | | | | | | | | | 5902) |
| CoVA2- | DIQLTQSPSSLSASVGDRVTITCRASQG | IGHV4-39 | IGHJ3 | IGKV1-17 | IGKJ4 | 2774 | ARQVRQWLE | 3976 | LQHNSYPL | Philip Brouwer et al., |
| 38 | IRNDLGWYQQKPGKAPKRLIYAASSL | (Human) | (Human) | (Human) | (Human) | | DDAFDI | | T | 2020 |
| | QSGVPSRFSGSGSGTEFTLTISSLQPED | | | | | | | | | (https://science.science |
| | FATYYCLQHNSYPLTFGGGTKVDIK | | | | | | | | | mag.org/content/early/ |
| | | | | | | | | | | 2020/06/15/science.abc |
| | | | | | | | | | | 5902) |
| CoVA2- | QSALTQPASVSGSPGQSITISCTGTSSD | IGHV3-53 | IGHJ3 | IGLV2-23 | IGLJ3 | 2775 | ARAHVDTAM | 3977 | CSYAGSST | Philip Brouwer et al., |
| 39 | VGSYNLVSWYQQHPGKAPKLMIYEVT | (Human) | (Human) | (Human) | (Human) | | VESGAFDI | | WV | 2020 |
| | KRPSGVSNRFSGSKSGNTASLTISGLQ | | | | | | | | | (https://science.science |
| | AEDEADYYCCSYAGSSTWVFGGGTKL | | | | | | | | | mag.org/content/early/ |
| | TVL | | | | | | | | | 2020/06/15/science.abc |
| | | | | | | | | | | 5902); Nicholas Wu |
| | | | | | | | | | | (https://www.biorxiv.or |
| | | | | | | | | | | g/content/10.1101/202 |
| | | | | | | | | | | 0.07.26.222232v1) |
| CoVA2- | QSVLTQPASVSGSPGQSITISCTGTSSD | IGHV4-4 | IGHJ5 | IGLV2-23 | IGLJ3 | 2776 | AGRYCSGGRC | 3978 | CSYAGSST | Philip Brouwer et al., |
| 40 | VGSYNLVSWYQQHPGKAPKLMIYEAS | (Human) | (Human) | (Human) | (Human) | | GWFDP | | WV | 2020 |
| | KRPSGISNRFSGSKSGNTASLTISGLQA | | | | | | | | | (https://science.science |
| | EDEADYYCCSYAGSSTWVFGGGTKPT | | | | | | | | | mag.org/content/early/ |
| | VL | | | | | | | | | 2020/06/15/science.abc |
| | | | | | | | | | | 5902) |
| CoVA2- | DIVMTQSPATLSVSPGERATLSCRASQ | IGHV3-21 | IGHJ6 | IGKV3-15 | IGKJ1 | 2777 | ARVQKDIVVV | 3979 | QQCYNWP | Philip Brouwer et al., |
| 41 | SVSSNLAWYQQKPGQAPRLLIYGAST | (Human) | (Human) | (Human) | (Human) | | PVALADYYYY | | PWT | 2020 |
| | RATGIPARFSGSGSGTEFTLTISSLQPE | | | | | | GMDV | | | (https://science.science |
| | DFAVYYCQQCYNWPPWTFGQGTRVE | | | | | | | | | mag.org/content/early/ |
| | FK | | | | | | | | | 2020/06/15/science.abc |
| | | | | | | | | | | 5902) |
| CoVA2- | DIVMTQSPSSLSASVGDRVTITCRASQ | IGHV1-18 | IGHJ4 | IGKV1-17 | IGKJ4 | 2778 | ARFDYGYPYS | 3980 | LQHNSYPL | Philip Brouwer et al., |
| 43 | GIRNDLGWYQQKPGKAPKRLIYAASSL | (Human) | (Human) | (Human) | (Human) | | SWSVLSIDY | | T | 2020 |
| | QSGVPSRFSGSGSGTEFTLTISSLQPED | | | | | | | | | (https://science.science |
| | FATYYCLQHNSYPLTFGGGTKLEIK | | | | | | | | | mag.org/content/early/ |
| | | | | | | | | | | 2020/06/15/science.abc |
| | | | | | | | | | | 5902) |
| CoVA2- | AIRMTQSPSSLSASVGDRVTITCRASQ | IGHV3-30 | IGHJ4 | IGKV1-39 | IGKJ2 | 2779 | AREGSRQWL | 3981 | QQSYTTFIY | Philip Brouwer et al., |
| 44 | SISSYLNWYQQKPGKAPKLLIYAASSLQ | (Human) | (Human) | (Human) | (Human) | | VIYFDY | | T | 2020 |
| | SGVPSRFSGSGSGTDFTLTISSLQPEDF | | | | | | | | | (https://science.science |
| | ATYYCQQSYTTFIYTFGQGTKLEIK | | | | | | | | | mag.org/content/early/ |
| | | | | | | | | | | 2020/06/15/science.abc |
| | | | | | | | | | | 5902) |
| CoVA2- | DIVMTQSPGTLSLSPGERATLSCRASQ | IGHV1-2 | IGHJ5 | IGKV3-20 | IGKJ1 | 2780 | ARGDGDYYD | 3982 | QQYGSSPY | Philip Brouwer et al., |
| 45 | SVSSSYLAWYQQKPGQAPRLLIYGASS | (Human) | (Human) | (Human) | (Human) | | SSGYYRPTLY | | T | 2020 |
| | RATGIPDRFSGSGSGTDFTLTISRLEPE | | | | | | NWLDP | | | (https://science.science |
| | DFAVYYCQQYGSSPYTFGQGTKVEIK | | | | | | | | | mag.org/content/early/ |
| | | | | | | | | | | 2020/06/15/science.abc |
| | | | | | | | | | | 5902) |
| CoVA2- | AIRMTQSPSSLSASVGDRVTITCQASQ | IGHV4-39 | IGHJ4 | IGKV1-33 | IGKJ4 | 2781 | ARHPSGLYQL | 3983 | QQYDNLLS | Philip Brouwer et al., |
| 46 | DISNYLNWYQQKPGKAPKLLIYDASNL | (Human) | (Human) | (Human) | (Human) | | LN | | LT | 2020 |
| | ETGVPSRFSGSGSGTDFTFTISSLQPED | | | | | | | | | (https://science.science |
| | IATYYCQQYDNLLSLTFGGGTKVEIK | | | | | | | | | mag.org/content/early/ |
| | | | | | | | | | | 2020/06/15/science.abc |
| | | | | | | | | | | 5902) |
| CoVA2- | EIVLTQSPDSLAVSLGERATINCKSSQS | IGHV3-9 | IGHJ4 | IGKV4-1 | IGKJ4 | 2782 | AKVATYYYDR | 3984 | QQYYSTPP | Philip Brouwer et al., |
| 47 | VLYSSNNKNYLAWYQQKPGQPPKLLI | (Human) | (Human) | (Human) | (Human) | | SGYYYGGALD | | LT | 2020 |
| | YWASTRESGVPDRFSGSGSGTHFTLTI | | | | | | Y | | | (https://science.science |
| | SSLQAEDVAVYYCQQYYSTPPLTFGGG | | | | | | | | | mag.org/content/early/ |
| | TKVDIK | | | | | | | | | 2020/06/15/science.abc |
| | | | | | | | | | | 5902) |
| CoVA3- | EIVMTQSPSSLSASVGDRVTITCRASQS | IGHV4-59 | IGHJ6 | IGKV1-39 | IGKJ4 | 2783 | ARGPAATYYY | 3985 | QQSYSTLT | Philip Brouwer et al., |
| 01 | MSSYLNWYQQKPGKAPKLLIYAASSL | (Human) | (Human) | (Human) | (Human) | | YMDV | | | 2020 |
| | QSGVPSRFSGSGSGTDFTLTISSLQPED | | | | | | | | | (https://science.science |
| | FATYYCQQSYSTLTFGGGTKVEIK | | | | | | | | | mag.org/content/early/ |
| | | | | | | | | | | 2020/06/15/science.abc |
| | | | | | | | | | | 5902) |
| CoVA3- | QTVVTQPPSVSVSPGQTARITCSGDAL | IGHV3-23 | IGHJ4 | IGLV3-25 | IGLJ3 | 2784 | AKEIAVAGCF | 3986 | QSADSSGT | Philip Brouwer et al., |
| 03 | PKQYAYWYQQKPGQAPVLVIYKDSER | (Human) | (Human) | (Human) | (Human) | | DY | | YRV | 2020 |
| | PSGIPERFSGSSSGTTVTLTISGVQAED | | | | | | | | | (https://science.science |
| | EADYYCQSADSSGTYRVFGGGTKLTVL | | | | | | | | | mag.org/content/early/ |
| | | | | | | | | | | 2020/06/15/science.abc |
| | | | | | | | | | | 5902) |

| | | | | | Not | | | | | |
|---|---|---|---|---|---|---|---|---|---|---|
| | Ab | | | Neutral- | Neutral- | | | SEQ | | SEQ |
| | or | | Doesn't | ising | ising | Protein + | | ID | | ID |
| Name | Nb | Binds to | Bind to | Vs | Vs | Epitope | Origin | NO.: | VH or VHH | NO.: |
| CoVA3- | Ab | SARS-CoV2 | SARS- | | SARS-CoV1, | S; non- | B-cells; SARS-CoV2 | 697 | EVQLVESGGGVVQPGRSLRLSCAASGFT | 1776 |
| 04 | | | CoV1 | | SARS-CoV2 | RBD | Human Patient | | FSSYGMHWVRQAPGKGLEWVAVIWY | |
| | | | | | | | | | DGSNKYYADSVKGRFTISRDNSKNTLYL | |
| | | | | | | | | | QMNSLRAEDTAVYYCARVGSVKSTAGY | |
| | | | | | | | | | DFWSGDPFDYWGQGTLVTVSS | |
| CoVA3- | Ab | SARS-CoV2 | SARS- | | SARS-CoV1, | S; RBD | B-cells; SARS-CoV2 | 698 | QVQLVQSGAEVKKPGASVKVSCKVSGY | 1777 |
| 05 | | | CoV1 | | SARS-CoV2 | | Human Patient | | TLTELSMHWVRQAPGKGLEWMGGFD | |
| | | | | | | | | | PEDGETIYAQKFQGRVTMTEDTSTDTAY | |
| | | | | | | | | | MELSSLRSEDTAVYYCATAYSVDTAMVR | |
| | | | | | | | | | GVGYWGQGTLVTVSS | |
| CoVA3- | Ab | SARS-CoV2 | SARS- | | SARS-CoV1, | S; RBD | B-cells; SARS-CoV2 | 699 | QVQLVESRAEVKKPGSSVKVSCKASGGT | 1778 |
| 06 | | | CoV1 | | SARS-CoV2 | | Human Patient | | FSSYAISWVRQAPGQGLEWMGRIIPILG | |
| | | | | | | | | | ITNYAQKFQGRVTITADKSTSTAYMELSS | |
| | | | | | | | | | LRSEDTAVYYCARDAPDYYDSSGPTYFD | |
| | | | | | | | | | YWGQGTLVTVSS | |
| CoVA3 | Ab | SARS-CoV2 | SARS- | | SARS-CoV1, | S; non- | B-cells; SARS-CoV2 | 700 | QVQLVESGGGLVQPGRSLRLSCAASGFT | 1779 |
| 07 | | | CoV1 | | SARS-CoV2 | RBD | Human Patient | | FDDYAMHWVRQAPGKGLEWVSGISW | |
| | | | | | | | | | NSGSIGYADSVKGRFTISRDNAKNSLYLQ | |
| | | | | | | | | | MNSLRAEDTALYYCAKAEPEVGGYDYY | |
| | | | | | | | | | MDVWGKGTMVTVSS | |
| CoVA3- | Ab | SARS-CoV1, | | | SARS-CoV1, | S; non- | B-cells; SARS-CoV2 | 701 | EVQLVESGPGLVKPSETLSLTCTVSGGSI | 1780 |
| 08 | | SARS-CoV2 | | | SARS-CoV2 | RBD | Human Patient | | SSYYWSWIRQPPGKGLEWIGYIYYSGST | |
| | | | | | | | | | NYNPSLKSRVTISVDTSKNQFSLRLSSVT | |
| | | | | | | | | | AADTAVYYCARGPAATYYYYMDVWGK | |
| | | | | | | | | | GTMVTVSS | |
| CoVA3- | Ab | SARS-CoV2 | SARS- | | SARS-CoV1, | S; RBD | B-cells; SARS-CoV2 | 702 | EVQLVESGGGLVQPGRSLRLSCAASGFT | 1781 |
| 09 | | | CoV1 | | SARS-CoV2 | | Human Patient | | FDDYAMHWVRQAPGKGLEWVSGISW | |
| | | | | | | | | | NSGSIGYADSVKGRFTISRDNAKNSLYLQ | |
| | | | | | | | | | MNSLRAEDTALYYCAKMGPDPAHDYG | |
| | | | | | | | | | RKNDAFDIWGQGTMVTVSS | |
| CoVA3- | Ab | SARS-CoV1, | | | SARS-CoV1, | S; RBD | B-cells; SARS-CoV2 | 703 | EVQLVESRAEMKKPGESLKISCKGSGYTF | 1782 |
| 10 | | SARS-CoV2 | | | SARS-CoV2 | | Human Patient | | TNHWIAWVRQMPGKGLEWMGIIYPG | |
| | | | | | | | | | DSDTRYSPSFEGQVTISADKSISTAYLQW | |
| | | | | | | | | | SSLKASDTAMYYCARRGYTYGADFYGLD | |
| | | | | | | | | | VWGQGTRVTVSS | |
| CR3022 | Ab | SARS-CoV1, | | SARS-CoV1 | SARS-CoV2 | S; RBD | B-cells; SARS-CoV1 | 704 | QMQLVQSGTEVKKPGESLKISCKGSGY | 1783 |
| | | SARS-CoV2 | | | | | Human Patient | | GFITYWIGWVRQMPGKGLEWMGIIYP | |
| | | | | | | | | | GDSETRYSPSFQGQVTISADKSINTAYLQ | |
| | | | | | | | | | WSSLKASDTAIYYCAGGSGISTPMDVW | |
| | | | | | | | | | GQGTTVTVSS | |
| CV-X1- | Ab | SARS-CoV2 | SARS- | SARS-CoV2 | | S; RBD | B-cells; SARS-CoV2 | | ND | |
| 126 | | | CoV1 | | | | Human Patient | | | |
| CV-X2- | Ab | SARS-CoV2 | SARS- | SARS-CoV2 | | S; RBD | B-cells; SARS-CoV2 | | ND | |
| 106 | | | CoV1 | | | | Human Patient | | | |
| CV05-163 | Ab | SARS-CoV2 | SARS- | SARS-CoV2 | | S; RBD | B-cells; SARS-CoV2 | | ND | |
| | | | CoV1 | | | | Human Patient | | | |

| | | | | | | SEQ | | SEQ | | |
|---|---|---|---|---|---|---|---|---|---|---|
| | | Heavy V | Heavy J | Light V | Light J | ID | | ID | | |
| Name | VL | Gene | Gene | Gene | Gene | NO.: | CDRH3 | NO.: | CDRL3 | Sources |
| CoVA3- | QPVLTQPPSVSVAPGQTARITCGGNN | IGHV3-33 | IGHJ4 | IGLV3-21 | IGLJ1 | 2785 | ARVGSVKSTA | 3987 | QVWDSSS | Philip Brouwer et al. |
| 04 | IGSKSVHWYQQKPGQAPVLVVYDDS | (Human) | (Human) | (Human) | (Human) | | GYDFWSGDP | | DHYV | 2020 |
| | DRPSGIPERFSGSNSGNTATLTISRVEA | | | | | | FDY | | | (https://science.science |
| | GDEADYYCQVWDSSSDHYVFGTGTK | | | | | | | | | mag.org/content/early/ |
| | VTVL | | | | | | | | | 2020/06/15/science.abc |
| | | | | | | | | | | 5902) |
| CoVA3- | NFMLTQPPSASGTPGQRVTISCSGSSS | IGHV1-24 | IGHJ4 | IGLV1-44 | IGLJ3 | 2786 | ATAYSVDTA | 3988 | AAWDDSL | Philip Brouwer et al., |
| 05 | NIGSNTVNWYQQLPGTAPKLLIYSNN | (Human) | (Human) | (Human) | (Human) | | MVRGVGY | | NGPHWV | 2020 |
| | QRPSGVPDRFSGSKSGTSASLAISGLQ | | | | | | | | | (https://science.science |
| | SEDEADYYCAAWDDSLNGPHWVFGG | | | | | | | | | mag.org/content/early/ |
| | GTKLTVL | | | | | | | | | 2020/06/15/science.abc |
| | | | | | | | | | | 5902) |
| CoVA3- | DVVMTQSPDSLAVSLGERATINCKSS | IGHV1-69 | IGHJ4 | IGKV4-1 | IGKJ4 | 2787 | ARDAPDYYDS | 3989 | QQYYSTPL | Philip Brouwer et al., |
| 06 | QSVLYSSNNKNYLAWYQQKPGQPPKL | (Human) | (Human) | (Human) | (Human) | | SGPTYFDY | | T | 2020 |
| | LIYWASTRESGVPDRFSGSGSGTDFTL | | | | | | | | | (https://science.science |
| | TISSLQAEDVAVYYCQQYYSTPLTFGG | | | | | | | | | mag.org/content/early/ |
| | GTKVDIK | | | | | | | | | 2020/06/15/science.abc |
| | | | | | | | | | | 5902) |
| CoVA3 | EIVLTQSPGTLSLSPGERATLSCRASQS | IGHV3-9 | IGHJ6 | IGKV3-20 | IGKJ3 | 2788 | AKMGPDPAH | 3990 | QQYGSSPF | Philip Brouwer et al., |
| 07 | VSSSYLAWYQQKPGQAPRLLIYGASSR | (Human) | (Human) | (Human) | (Human) | | DYGRKNDAF | | T | 2020 |
| | ATGIPDRFSGSGSGTDFTLTISRLEPED | | | | | | DI | | | (https://science.science |
| | FAVYYCQQYGSSPFTFGPGTKLEIK | | | | | | | | | mag.org/content/early/ |
| | | | | | | | | | | 2020/06/15/science.abc |
| | | | | | | | | | | 5902) |
| CoVA3- | DIVMTQSPSSLSASVGDRVTITCRASQ | IGHV4-59 | IGHJ6 | IGKV1-39 | IGKJ4 | 2789 | AKAEPEVGGY | 3991 | QQSYSTPL | Philip Brouwer et al., |
| 08 | SISSYLNWYQQKPGKAPKLLIYAASSLQ | (Human) | (Human) | (Human) | (Human) | | DYYMDV | | T | 2020 |
| | SGVPSRFSGSGSGTDFTLTISSLQPEDF | | | | | | | | | (https://science.science |
| | ATYYCQQSYSTPLTFGPGTKLEIK | | | | | | | | | mag.org/content/early/ |
| | | | | | | | | | | 2020/06/15/science.abc |
| | | | | | | | | | | 5902) |
| CoVA3- | DIVMTQSPSSLSASVGDRVTITCRASQ | IGHV3-9 | IGHJ3 | IGKV1-39 | IGKJ4 | 2790 | ARGPAATYYY | 3992 | QQSYSTLT | Philip Brouwer et al., |
| 09 | SMSSYLNWYQQKPGKAPKLLIYAASSL | (Human) | (Human) | (Human) | (Human) | | YMDV | | | 2020 |
| | QSGVPSRFSGSGSGTDFTLTISSLQPED | | | | | | | | | (https://science.science |
| | FATYYCQQSYSTLTFGGGTKLEIK | | | | | | | | | mag.org/content/early/ |
| | | | | | | | | | | 2020/06/15/science.abc |
| | | | | | | | | | | 5902) |
| CoVA3- | DIVMTQSPDSLAVSLGERATINCKSSQ | IGHV5-51 | IGHJ6 | IGKV4-1 | IGKJ5 | 2791 | ARRGYTYGAD | 3993 | QQYYSTP | Philip Brouwer et al., |
| 10 | SVLYSSNNKNYLAWYQQKPGQPPKLLI | (Human) | (Human) | (Human) | (Human) | | FYGLDV | | IT | 2020 |
| | YWASTRESGVPDRFSGSGSGTDFTLTI | | | | | | | | | (https://science.science |
| | SSLQAEDVAVYYCQQYYSTPITFGQGT | | | | | | | | | mag.org/content/early/ |
| | RLEIK | | | | | | | | | 2020/06/15/science.abc |
| | | | | | | | | | | 5902) |
| CR3022 | DIQLTQSPDSLAVSLGERATINCKSSQS | IGHV5-51 | IGHJ6 | IGKV4-1 | IGKJ1 | 2792 | AGGSGISTPM | 3994 | QQYYSTPY | Jan ter Meulen et al., |
| | VLYSSINKNYLAWYQQKPGQPPKLLIY | (Human) | (Human) | (Human) | (Human) | | DV | | T | 2006 |
| | WASTRESGVPDRFSGSGSGTDFTLTIS | | | | | | | | | (https://journals.plos.or |
| | SLQAEDVAVYYCQQYYSTPYTFGQGT | | | | | | | | | g/plosmedicine/article?i |
| | KVEIK | | | | | | | | | d=10.1371/journal.pme |
| | | | | | | | | | | d.0030237); Meng Yuan |
| | | | | | | | | | | et al., 2020a |
| | | | | | | | | | | (https://science.science |
| | | | | | | | | | | mag.org/content/early/ |
| | | | | | | | | | | 2020/04/02/science.abb |
| | | | | | | | | | | 7269); Meng Yuan et al., |
| | | | | | | | | | | 2020b |
| | | | | | | | | | | (https://www.biorxiv.or |
| | | | | | | | | | | g/content/10.1101/202 |
| | | | | | | | | | | 0.06.08.141267v1) |
| CV-X1- | ND | IGHV3-53 | IGHJ6 | ND | ND | 2793 | ARDLSEGGM | 3995 | QQANGFP | Jakob Kreye et al., 2020 |
| 126 | | (Human) | (Human) | | | | DV | | PL | (https://www.biorxiv.or |
| | | | | | | | | | | g/content/10.1101/202 |
| | | | | | | | | | | 0.08.15.252320v1.full.p |
| | | | | | | | | | | df) |
| CV-X2- | ND | IGHV1-69 | IGHJ6 | ND | ND | 2794 | ATRKETTVTTS | 3996 | QQSYSTPY | Jakob Kreye et al., 2020 |
| 106 | | (Human) | (Human) | | | | LVYGMDV | | T | (https://www.biorxiv.or |
| | | | | | | | | | | g/content/10.1101/202 |
| | | | | | | | | | | 0.08.15.252320v1.full.p |
| | | | | | | | | | | df) |
| CV05-163 | ND | IGHV1-2 | IGHJ6 | ND | ND | 2795 | AREVMVRGA | 3997 | QQRSNWP | Jakob Kreye et al., 2020 |
| | | (Human) | (Human) | | | | LPPYGMDV | | PVT | (https://www.biorxiv.or |
| | | | | | | | | | | g/content/10.1101/202 |
| | | | | | | | | | | 0.08.15.252320v1.full.p |
| | | | | | | | | | | df) |

| | | | | | Not | | | | | |
|---|---|---|---|---|---|---|---|---|---|---|
| | Ab | | | Neutral- | Neutral- | | | SEQ | | SEQ |
| | or | | Doesn't | ising | ising | Protein + | | ID | | ID |
| Name | Nb | Binds to | Bind to | Vs | Vs | Epitope | Origin | NO.: | VH or VHH | NO.: |
| CV07-200 | Ab | SARS-CoV2 | SARS- | SARS-CoV2 | | S; RBD | B-cells; SARS-CoV2 | | ND | |
| | | | CoV1 | | | | Human Patient | | | |
| CV07-209 | Ab | SARS-CoV2 | SARS- | SARS-CoV2 | | S; RBD | B-cells; SARS-CoV2 | | ND | |
| | | | CoV1 | | | | Human Patient | | | |
| CV07-222 | Ab | SARS-CoV2 | SARS- | SARS-CoV2 | | S; RBD | B-cells; SARS-CoV2 | | ND | |
| | | | CoV1 | | | | Human Patient | | | |
| CV07-250 | Ab | SARS-CoV2 | SARS- | SARS-CoV2 | | S; RBD | B-cells; SARS-CoV2 | | ND | |
| | | | CoV1 | | | | Human Patient | | | |
| CV07-255 | Ab | SARS-CoV2 | SARS- | SARS-CoV2 | | S; RBD | B-cells; SARS-CoV2 | | ND | |
| | | | CoV1 | | | | Human Patient | | | |
| CV07-262 | Ab | SARS-CoV2 | SARS- | SARS-CoV2 | | S; RBD | B-cells; SARS-CoV2 | | ND | |
| | | | CoV1 | | | | Human Patient | | | |
| CV07-270 | Ab | SARS-CoV2 | SARS- | SARS-CoV2 | | S; RBD | B-cells; SARS-CoV2 | | ND | |
| | | | CoV1 | | | | Human Patient | | | |
| CV07-283 | Ab | SARS-CoV2 | SARS- | SARS-CoV2 | | S; RBD | B-cells; SARS-CoV2 | | ND | |
| | | | CoV1 | | | | Human Patient | | | |
| CV07-287 | Ab | SARS-CoV2 | SARS- | SARS-CoV2 | | S; RBD | B-cells; SARS-CoV2 | | ND | |
| | | | CoV1 | | | | Human Patient | | | |
| CV07-315 | Ab | SARS-CoV2 | SARS- | SARS-CoV2 | | S; RBD | B-cells; SARS-CoV2 | | ND | |
| | | | CoV1 | | | | Human Patient | | | |
| CV1 | Ab | SARS-CoV1, | | SARS-CoV2 | | S; non- | B-cells; SARS-CoV2 | 705 | QVQLQESGPGLVKPSETLSLTCTVSGYSI | 1784 |
| | | SARS-CoV2 | | | | RBD | Human Patient | | SSGYYWGWIRQPPGKGLEWIGSIYHSG | |
| | | | | | | | | | STYYNPSLKSRVTISVDTSKNQFSLKLSSV | |
| | | | | | | | | | TAADTAVYYCARTPLSLRLRYNWYFDLW | |
| | | | | | | | | | GRGTLVTVSS | |
| CV10 | Ab | SARS-CoV1, | | | SARS-CoV2 | S; non- | B-cells; SARS-CoV2 | 706 | QVQLQESGPGLVKPSETLSLTCNVSGGSI | 1785 |
| | | SARS-CoV2 | | | | RBD | Human Patient | | SSYYWSWIRQPPGKGLEWIGYIYYSGST | |
| | | | | | | | | | NYNPSLKSRVTISVDTSKNQFSLKLSSVTA | |
| | | | | | | | | | ADTAVYYCARGFDYWGQGTLVTVSS | |
| CV11 | Ab | SARS-CoV1, | | | SARS-CoV2 | S; non- | B-cells; SARS-CoV2 | 707 | QVQLQESGPGLVKPSQTLSLTCTVSGGSI | 1786 |
| | | SARS-CoV2 | | | | RBD | Human Patient | | SSGGYYWSWIRQHPGKGLEWIGYIYYS | |
| | | | | | | | | | GSTYYNPSLKSRVTISVDTSKNQFSLKLSS | |
| | | | | | | | | | VTAADTAVYYCARETTGHFDYWGQGTL | |
| | | | | | | | | | VTVSS | |

| | | | | | | SEQ | | SEQ | | |
|---|---|---|---|---|---|---|---|---|---|---|
| | | Heavy V | Heavy J | Light V | Light J | ID | | ID | | |
| Name | VL | Gene | Gene | Gene | Gene | NO.: | CDRH3 | NO.: | CDRL3 | Sources |
| CV07-200 | ND | IGHV1-2 | IGHJ6 | ND | ND | 2796 | ARGPFYYDNS | 3998 | SSYTSSSTY | Jakob Kreye et al., 2020 |
| | | (Human) | (Human) | | | | GTLGGLDV | | V | (https://www.biorxiv.or |
| | | | | | | | | | | g/content/10.1101/202 |
| | | | | | | | | | | 0.08.15.252320v1.full.p |
| | | | | | | | | | | df) |
| CV07-209 | ND | IGHV3-11 | IGHJ4 | ND | ND | 2797 | ARDGVIPPRF | 3999 | QQYDNLPL | Jakob Kreye et al., 2020 |
| | | (Human) | (Human) | | | | DY | | T | (https://www.biorxiv.or |
| | | | | | | | | | | g/content/10.1101/202 |
| | | | | | | | | | | 0.08.15.252320v1.full.p |
| | | | | | | | | | | df) |
| CV07-222 | ND | IGHV1-2 | IGHJ3 | ND | ND | 2798 | ARGPYYYDSS | 4000 | CSYAGGST | Jakob Kreye et al., 2020 |
| | | (Human) | (Human) | | | | GSLGAFDI | | SYV | (https://www.biorxiv.or |
| | | | | | | | | | | g/content/10.1101/202 |
| | | | | | | | | | | 0.08.15.252320v1.full.p |
| | | | | | | | | | | df) |
| CV07-250 | ND | IGHV1-18 | IGHJ6 | ND | ND | 2799 | AGSDNYGFPY | 4001 | SSYAGNND | Jakob Kreye et al., 2020 |
| | | (Human) | (Human) | | | | NGMDV | | FV | (https://www.biorxiv.or |
| | | | | | | | | | | g/content/10.1101/202 |
| | | | | | | | | | | 0.08.15.252320v1.full.p |
| | | | | | | | | | | df) |
| CV07-255 | ND | IGHV1-2 | IGHJ4 | ND | ND | 2800 | ARDSRFSYVN | 4002 | CSYAGHST | Jakob Kreye et al., 2020 |
| | | (Human) | (Human) | | | | GEFDY | | WV | (https://www.biorxiv.or |
| | | | | | | | | | | g/content/10.1101/202 |
| | | | | | | | | | | 0.08.15.252320v1.full.p |
| | | | | | | | | | | df) |
| CV07-262 | ND | IGHV1-2 | IGHJ6 | ND | ND | 2801 | ARVGWYDFG | 4003 | CSYAGTST | Jakob Kreye et al., 2020 |
| | | (Human) | (Human) | | | | TPGDYYYYYG | | FV | (https://www.biorxiv.or |
| | | | | | | | MDV | | | g/content/10.1101/202 |
| | | | | | | | | | | 0.08.15.252320v1.full.p |
| | | | | | | | | | | df) |
| CV07-270 | ND | IGHV1-2 | IGHJ6 | ND | ND | 2802 | ARVFGPGLDC | 4004 | CSYAGSSS | Jakob Kreye et al., 2020 |
| | | (Human) | (Human) | | | | SSTSCYTYGM | | WV | (https://www.biorxiv.or |
| | | | | | | | DV | | | g/content/10.1101/202 |
| | | | | | | | | | | 0.08.15.252320v1.full.p |
| | | | | | | | | | | df) |
| CV07-283 | ND | IGHV1-2 | IGHJ6 | ND | ND | 2803 | VRGPFYYDSS | 4005 | SSYTSSSTY | Jakob Kreye et al., 2020 |
| | | (Human) | (Human) | | | | GPLGGMDV | | V | (https://www.biorxiv.or |
| | | | | | | | | | | g/content/10.1101/202 |
| | | | | | | | | | | 0.08.15.252320v1.full.p |
| | | | | | | | | | | df) |
| CV07-287 | ND | IGHV1-58 | IGHJ3 | ND | ND | 2804 | AAPYCSSTNC | 4006 | QQYYGSSP | Jakob Kreye et al., 2020 |
| | | (Human) | (Human) | | | | YDAFDI | | WT | (https://www.biorxiv.or |
| | | | | | | | | | | g/content/10.1101/202 |
| | | | | | | | | | | 0.08.15.252320v1.full.p |
| | | | | | | | | | | df) |
| CV07-315 | ND | IGHV3-9 | IGHJ6 | ND | ND | 2805 | AKDFLWDLH | 4007 | QQSYSTHA | Jakob Kreye et al., 2020 |
| | | (Human) | (Human) | | | | PPRYYGMDV | | | (https://www.biorxiv.or |
| | | | | | | | | | | g/content/10.1101/202 |
| | | | | | | | | | | 0.08.15.252320v1.full.p |
| | | | | | | | | | | df) |
| CV1 | QSVLTQPPSASGTPGQRVTISCSGSSS | IGHV4-38- | IGHJ2 | IGLV1-44 | IGLJ3 | 2806 | ARTPLSLRLRY | 4008 | AAWDDSL | Emilie Seydoux et al., |
| | NIGSNTVNWYQQLPGTAPKLLIYSNN | 2 | (Human) | (Human) | (Human) | | NWYFDL | | NGPV | 2020 |
| | QRPSGVPDRFSGSKSGTSASLAISGLQ | (Human) | | | | | | | | (https://www.biorxiv.or |
| | SEDEADYYCAAWDDSLNGPVFGGGT | | | | | | | | | g/content/10.1101/202 |
| | KLTVL | | | | | | | | | 0.05.12.091298v1) |
| CV10 | EIVLTQSPGTLSLSPGERATLSCRASQS | IGHV4-59 | IGHJ4 | IGKV3-20 | IGKJ1 | 2807 | ARGFDY | 4009 | QQYAGSP | Emilie Seydoux et al., |
| | VSSIYLAWYQQKPGQAPRLLIYGASSR | (Human) | (Human) | (Human) | (Human) | | | | WT | 2020 |
| | ATGIPDRFSGSGSGTDFTLTISRLEPED | | | | | | | | | (https://www.biorxiv.or |
| | FAVYYCQQYAGSPWTFGQGTKVEIK | | | | | | | | | g/content/10.1101/202 |
| | | | | | | | | | | 0.05.12.091298v1) |
| CV11 | EIVLTQSPATLSLSPGERATLSCRASQS | IGHV4-31 | IGHJ4 | IGKV3-11 | IGKJ3 | 2808 | ARETTGHFDY | 4010 | PIFT | Emilie Seydoux et al., |
| | VSSYLAWYQQKPGQAPRLLIYDASNR | (Human) | (Human) | (Human) | (Human) | | | | QQRSNWP | 2020 |
| | ATGIPARFSGSGSGTDFTLTISSLEPEDF | | | | | | | | | (https://www.biorxiv.or |
| | AVYYCQQRSNWPPIFTFGPGTKVDIK | | | | | | | | | g/content/10.1101/202 |
| | | | | | | | | | | 0.05.12.091298v1) |

| | | | | | Not | | | | | |
|---|---|---|---|---|---|---|---|---|---|---|
| | Ab | | | Neutral- | Neutral- | | | SEQ | | SEQ |
| | or | | Doesn't | ising | ising | Protein + | | ID | | ID |
| Name | Nb | Binds to | Bind to | Vs | Vs | Epitope | Origin | NO.: | VH or VHH | NO.: |
| CV12 | Ab | SARS-CoV2 | SARS- | | SARS-CoV2 | S; non- | B-cells; SARS-CoV2 | 708 | QVQLVESGGGVVQPGRSLRLSCAASGF | 1787 |
| | | | CoV1 | | | RBD | Human Patient | | NLSNYAMHWVRQASGKGLEWVSLISY | |
| | | | | | | | | | DGSVKYYTDSVKGRFTVSGDNSKNTLFL | |
| | | | | | | | | | QMNSLRPDDSALYYCVRGGVSGPNSFD | |
| | | | | | | | | | MWGQGTTVTVSS | |
| CV13 | Ab | SARS-CoV1, | | | SARS-CoV2 | S; non- | B-cells; SARS-CoV2 | 709 | QVQLVQSGSELKKPGASVKLSCQASGYS | 1788 |
| | | SARS-CoV2 | | | | RBD | Human Patient | | FTNHAMNWVRQAPGQGLEWMGWIN | |
| | | | | | | | | | TNTGNPTYAQGFTGRFVFSLDTSVSTTYL | |
| | | | | | | | | | HISSLKAEDTAVYYCARASARPGVATNL | |
| | | | | | | | | | DFWGQGTLVVVSS | |
| CV15 | Ab | SARS-CoV2 | SARS- | | SARS-CoV2 | S; non- | B-cells; SARS-CoV2 | 710 | EVQLVESGGGLVQPGGSLRLSCAASGFT | 1789 |
| | | | CoV1 | | | RBC | Human Patient | | FSSYWMSWVRQAPGKGLEWVANIKQ | |
| | | | | | | | | | DGSEKYYVDSVKGRFTISRDNAKNSLYL | |
| | | | | | | | | | QMNSLRAEDTAVYYCARDFNSYQLLWY | |
| | | | | | | | | | YYYGMDVWGQGTTVTVSS | |
| CV16 | Ab | SARS-CoV2 | SARS- | | SARS-CoV2 | S; non- | B-cells; SARS-CoV2 | 711 | EVQLVQSGAEVKKPGESLKISCKGSGYSF | 1790 |
| | | | CoV1 | | | RBD | Human Patient | | TSYWIGWVRQMPGKGLEWMGIIYPGD | |
| | | | | | | | | | SDTRYSPSFQGQVTISADKSISTAYLQWS | |
| | | | | | | | | | SLKASDTAMYYCARQSSFYSSGWYSYG | |
| | | | | | | | | | MDVWGQGTTVTVSS | |
| CV17 | Ab | SARS-CoV2 | SARS- | | SARS-CoV2 | S; non- | B-cells; SARS-CoV2 | 712 | QVQLVQSGAEVKKPGASVKVSCKASGY | 1791 |
| | | | CoV1 | | | RBD | Human Patient | | TFTGYYMHWVRQAPGQGLEWMGWI | |
| | | | | | | | | | NPNSGGTNYAQKFQGRVTMTRDTSIST | |
| | | | | | | | | | AYMELSRLRSDDTAVYYCARVDYGSGSY | |
| | | | | | | | | | GWGWFDPWGQGTLVTVSS | |
| CV18 | Ab | SARS-CoV1, | | | SARS-CoV2 | S; non- | B-cells; SARS-CoV2 | 713 | QVQLVQSGAEVKKPGASVKVSCKVSGY | 1792 |
| | | SARS-CoV2 | | | | RBD | Human Patient | | TLTELSMHWVRQAPGKGLEWMGGFD | |
| | | | | | | | | | PEDGETIYAQKFQGRVTMTEDTSTDTAY | |
| | | | | | | | | | MELSSLRSEDTAVYYCATTSPIVGAITWF | |
| | | | | | | | | | DPWGQGTLVTVSS | |
| CV19 | Ab | SARS-CoV2 | SARS- | | SARS-CoV2 | S; non- | B-cells; SARS-CoV2 | 714 | QVQLVQSGAEVKKPGASVKVSCKASGY | 1793 |
| | | | CoV1 | | | RBD | Human Patient | | TFTGYYMHWVRQAPGQGLEWMGWI | |
| | | | | | | | | | NPNSGGTNYAQKFQGRVTMTRDTSIST | |
| | | | | | | | | | AYMELSRLRSDDTAVYYCAREYYYDSSVY | |
| | | | | | | | | | PYYYYAMDVWGQGTTVTVSS | |
| CV2 | Ab | SARS-CoV2 | SARS- | | SARS-CoV2 | S; non- | B-cells; SARS-CoV2 | 715 | QVQLVESGGGVVQPGRSLRLSCAASGF | 1794 |
| | | | CoV1 | | | RBD | Human Patient | | TFSSYAMHWVRQAPGKGLEWVAVISY | |
| | | | | | | | | | DGSNKYYADSVKGRFTISRDNSKNTLYL | |
| | | | | | | | | | QMNSLRAEDTAVYYCARVRGSYYLFDY | |
| | | | | | | | | | WGQGTLVTVSS | |
| CV21 | Ab | SARS-CoV2 | SARS- | | SARS-CoV2 | S; non- | B-cells; SARS-CoV2 | 716 | EVQLVESGGGLVKPGGSLRLSCAASGFT | 1795 |
| | | | CoV1 | | | RBD | Human Patient | | FSNAWMSWVRQAPGKGLEWVGRIKSK | |
| | | | | | | | | | TDGGTTDYAAPVKGRFTISRDDSKNTLY | |
| | | | | | | | | | LQMNSLKTEDTAVYYCTTDRVYDYIWGS | |
| | | | | | | | | | YRYLDYWGQGTLVTVSS | |
| CV22 | Ab | SARS-CoV1, | | | SARS-CoV2 | S; non- | B-cells; SARS-CoV2 | 717 | EVQLVESGGGLVKPGGSLRLSCAASGFT | 1796 |
| | | SARS-CoV2 | | | | RBD | Human Patient | | FSSYSMNWVRQAPGKGLEWVSSISSSSS | |
| | | | | | | | | | YIYYADSVKGRFTISRDNAKNSLYLQMNS | |
| | | | | | | | | | LRAEDTAVYYCARDRESYDILTGYSMEG | |
| | | | | | | | | | CFDYWGQGTLVTVSS | |
| CV23 | Ab | SARS-CoV2 | SARS- | | SARS-CoV2 | S; non- | B-cells; SARS-CoV2 | 718 | QVQLVQSGAEVKKPGASVKVSCKASGY | 1797 |
| | | | CoV1 | | | RBD | Human Patient | | TFTSYAMHWVRQAPGQRLEWMGWIN | |
| | | | | | | | | | AGNGNTKYSQKFQGRVTITRDTSASTAY | |
| | | | | | | | | | MELSSLRSEDTAVYYCARVWGYCSGGS | |
| | | | | | | | | | CYVDAFDIWGQGTMVTVSS | |
| CV24 | Ab | SARS-CoV2 | SARS- | | SARS-CoV2 | S; non- | B-cells; SARS-CoV2 | 719 | QVQLVQSGAEVKKPGASVKVSCKVSGY | 1798 |
| | | | CoV1 | | | RBD | Human Patient | | TLTELSMHWVRQAPGKGLEWMGGFD | |
| | | | | | | | | | PEDGETIYAQKFQGRVTMTEDTSTDTAY | |
| | | | | | | | | | MELSSLRSEDTAVYYCATAPPYSPPSSWF | |
| | | | | | | | | | DPWGQGTLVTVSS | |
| CV25 | Ab | SARS-CoV2 | SARS- | | SARS-CoV2 | S; non- | B-cells; SARS-CoV2 | 720 | QVQLQESGPGLVKPSQTLSLTCTVSGGSI | 1799 |
| | | | CoV1 | | | RBC | Human Patient | | SSGDYYWSWIRQPPGKGLEWIGYIYYSG | |
| | | | | | | | | | STYYNPSLKSRVTISVDTSKNQFSLKLSSV | |
| | | | | | | | | | TAADTAVYYCARDHHYDFWSGYSSYYYY | |
| | | | | | | | | | GMDVWGQGTTVTVSS | |

| | | | | | | SEQ | | SEQ | | |
|---|---|---|---|---|---|---|---|---|---|---|
| | | Heavy V | Heavy J | Light V | Light J | ID | | ID | | |
| Name | VL | Gene | Gene | Gene | Gene | NO.: | CDRH3 | NO.: | CDRL3 | Sources |
| CV12 | DVVMTQSPLSLPVTLGQPATISCRSSQ | IGHV3-30 | IGHJ4 | IGKV2-30 | IGKJ1 | 2809 | VRGGVSGPN | 4011 | MQGTHW | Emilie Seydoux et al., |
| | SLVYSDGNTYVNWFQQRPGQSPRRLI | (Human) | (Human) | (Human) | (Human) | | SFDM | | PVT | 2020 |
| | YQVSIRASGVPDRFSGSGSGTDFALKIS | | | | | | | | | (https://www.biorxiv.or |
| | RVEAEDVGVYYCMQGTHWPVTFGQ | | | | | | | | | g/content/10.1101/202 |
| | GTKVEIK | | | | | | | | | 0.05.12.091298v1) |
| CV13 | DIQMTQSPSSLSASVGDRVTITCRASQ | IGHV7-4- | IGHJ4 | IGKV1-39 | IGKJ3 | 2810 | ARASARPGVA | 4012 | QQSYSNPL | Emilie Seydoux et al., |
| | NIDNYLNWYQQKPGKAPKLLIYAASRL | 1 (Human) | (Human) | (Human) | (Human) | | TNLDF | | T | 2020 |
| | HSGVPSRFSGSGSGTDFTLIISSLQPED | | | | | | | | | (https://www.biorxiv.or |
| | LATYYCQQSYSNPLTFGPGTKVDIR | | | | | | | | | g/content/10.1101/202 |
| | | | | | | | | | | 0.05.12.091298v1) |
| CV15 | QSALTQPRSVSGSPGQSVTISCTGTSS | IGHV3-7 | IGHJ6 | IGLV2-11 | IGLJ3 | 2811 | ARDFNSYQLL | 4013 | CSYAGSYT | Emilie Seydoux et al., |
| | DVGGYNYVSWYQQHPGKAPKLMIYD | (Human) | (Human) | (Human) | (Human) | | WYYYYGMDV | | WV | 2020 |
| | VSKRPSGVPDRFSGSKSGNTASLTISGL | | | | | | | | | (https://www.biorxiv.or |
| | QAEDEADYYCCSYAGSYTWVFGGGTK | | | | | | | | | g/content/10.1101/202 |
| | LTVL | | | | | | | | | 0.05.12.091298v1) |
| CV16 | EIVLTQSPGTLSLSPGERATLSCRASQS | IGHV5-51 | IGHJ6 | IGKV3-20 | IGKJ1 | 2812 | ARQSSFYSSG | 4014 | QQYGSSR | Emilie Seydoux et al., |
| | VSSSYLAWYQQKPGQAPRLLIYGASSR | (Human) | (Human) | (Human) | (Human) | | WYSYGMDV | | GT | 2020 |
| | ATGIPDRFSGSGSGTDFTLTISRLEPED | | | | | | | | | (https://www.biorxiv.or |
| | FAVYYCQQYGSSRGTFGQGTKVEIK | | | | | | | | | g/content/10.1101/202 |
| | | | | | | | | | | 0.05.12.091298v1) |
| CV17 | QSALTQPASVSGSPGQSITISCTGTSSD | IGHV1-2 | IGHJ5 | IGLV2-23 | IGLJ1 | 2813 | ARVDYGSGSY | 4015 | CSYAGSST | Emilie Seydoux et al., |
| | VGSYNLVSWYQQHPGKAPKLMIYEGS | (Human) | (Human) | (Human) | (Human) | | GWGWFDP | | YV | 2020 |
| | KRPSGVSNRFSGSKSGNTASLTISGLQ | | | | | | | | | (https://www.biorxiv.or |
| | AEDEADYYCCSYAGSSTYVFGTGTKVT | | | | | | | | | g/content/10.1101/202 |
| | VL | | | | | | | | | 0.05.12.091298v1) |
| CV18 | QSVLTQPPSVSAAPGQKVTISCSGSSS | IGHV1-24 | IGHJ5 | IGLV1-51 | IGLJ3 | 2814 | ATTSPIVGA | 4016 | GTWDSSLS | Emilie Seydoux et al., |
| | NIGNNYVSWYQQLPGTAPKLLIYDNN | (Human) | (Human) | (Human) | (Human) | | ITWFDP | | AGPV | 2020 |
| | KRPSGIPDRFSGSKSGTSATLGITGLQT | | | | | | | | | (https://www.biorxiv.or |
| | GDEADYYCGTWDSSLSAGPVFGGGT | | | | | | | | | g/content/10.1101/202 |
| | KLTVL | | | | | | | | | 0.05.12.091298v1) |
| CV19 | EIVLTQSPGTLSLSPGERATLSCRASQS | IGHV1-2 | IGHJ6 | IGKV3-20 | IGKJ2 | 2815 | AREYYYDSSV | 4017 | QQYGSSPP | Emilie Seydoux et al., |
| | VSSSYLAWYQQKPGQAPRLLIYGASSR | (Human) | (Human) | (Human) | (Human) | | YPYYYYAMDV | | KYT | 2020 |
| | ATGIPDRFSGSGSGTDFTLTISRLEPED | | | | | | | | | (https://www.biorxiv.or |
| | FAVYYCQQYGSSPPKYTFGQGTKLEIK | | | | | | | | | g/content/10.1101/202 |
| | | | | | | | | | | 0.05.12.091298v1) |
| CV2 | EIVMTQSPATLSVSPGERATLSCRASQ | IGHV3-30 | IGHJ4 | IGKV3-15 | IGKJ4 | 2816 | ARVRGSYYLF | 4018 | QQYNNWP | Emilie Seydoux et al., |
| | SVSSNLAWYQQKPGQAPRLLIYGAST | (Human) | (Human) | (Human) | (Human) | | DY | | PSLT | 2020 |
| | RATGIPARFSGSGSGTEFTLTISSLQSE | | | | | | | | | (https://www.biorxiv.or |
| | DFAVYYCQQYNNWPPSLTFGGGTKV | | | | | | | | | g/content/10.1101/202 |
| | EIK | | | | | | | | | 0.05.12.091298v1) |
| CV21 | EIVLTQSPATLSLSPGERATLSCRASQS | IGHV3-15 | IGHJ4 | IGKV3-11 | IGKJ4 | 2817 | TTDRVYDYIW | 4019 | QQRSNWP | Emilie Seydoux et al., |
| | VSSYLAWYQQKPGQAPRLLIYDASNR | (Human) | (Human) | (Human) | (Human) | | GSYRYLDY | | LT | 2020 |
| | ATGIPARFSGSGSGTDFTLTISSLEPEDF | | | | | | | | | (https://www.biorxiv.or |
| | AVYYCQQRSNWPLTFGGGTKVEIK | | | | | | | | | g/content/10.1101/202 |
| | | | | | | | | | | 0.05.12.091298v1) |
| CV22 | QLVLTQSPSASASLGASVKLTCTLSSGH | IGHV3-21 | IGHJ4 | IGLV4-69 | IGLJ3 | 2818 | ARDRESYDIL | 4020 | QTWGTGI | Emilie Seydoux et al., |
| | SSYAIAWHQQQPEKGPRYLMKLNSD | (Human) | (Human) | (Human) | (Human) | | TGYSMEGCFD | | RV | 2020 |
| | GSHSKGDGIPDRFSGSSSGAERYLTISS | | | | | | Y | | | (https://www.biorxiv.or |
| | LQSEDEADYYCQTWGTGIRVFGGGTK | | | | | | | | | g/content/10.1101/202 |
| | LTVL | | | | | | | | | 0.05.12.091298v1) |
| CV23 | SYELTQPPSVSVSPGQTARITCSGDALP | IGHV1-3 | IGHJ3 | IGLV3-25 | IGLJ3 | 2819 | ARVWGYCSG | 4021 | QSADSSGT | Emilie Seydoux et al., |
| | KQYAYWYQQKPGQAPVLVIYKDSERP | (Human) | (Human) | (Human) | (Human) | | GSCYVDAFDI | | YVV | 2020 |
| | SGIPERFSGSSSGTTVTLTISGVQAEDE | | | | | | | | | (https://www.biorxiv.or |
| | ADYYCQSADSSGTYVVFGGGTKLTVL | | | | | | | | | g/content/10.1101/202 |
| | | | | | | | | | | 0.05.12.091298v1) |
| CV24 | QSVLTQPPSVSAAPGQKVTISCSGSSS | IGHV1-24 | IGHJ5 | IGLV1-51 | IGLJ1 | 2820 | ATAPPYSPPS | 4022 | GTWDSSL | Emilie Seydoux et al., |
| | NIGNNYVSWYQQLPGTAPKLLIYDNN | (Human) | (Human) | (Human) | (Human) | | SWFDP | | SASYV | 2020 |
| | KRPSGIPDRFSGSKSGTSATLGITGLQT | | | | | | | | | (https://www.biorxiv.or |
| | GDEADYYCGTWDSSLSASYVFGTGTK | | | | | | | | | g/content/10.1101/202 |
| | VTVL | | | | | | | | | 0.05.12.091298v1) |
| CV25 | EIVMTQSPATLSVSPGERATLSCRASQ | IGHV4-30- | IGHJ6 | IGKV3-15 | IGKJ2 | 2821 | ARDHHYDFW | 4023 | QQYNNWP | g/content/10.1101/202 |
| | SVSSNLAWYQQKPGQAPRLLIYGAST | 4 | (Human) | (Human) | (Human) | | SGYSSYYYYG | | YT | Emilie Seydoux et al., |
| | RATGIPARFSGSGSGTEFTLTISSLQSE | (Human) | | | | | MDV | | | 2020 |
| | DFAVYYCQQYNNWPYTFGQGTKLEIK | | | | | | | | | (https://www.biorxiv.or |
| | | | | | | | | | | 0.05.12.091298v1) |

| | | | | | Not | | | | | |
|---|---|---|---|---|---|---|---|---|---|---|
| | Ab | | | Neutral- | Neutral- | | | SEQ | | SEQ |
| | or | | Doesn't | ising | ising | Protein + | | ID | | ID |
| Name | Nb | Binds to | Bind to | Vs | Vs | Epitope | Origin | NO.: | VH or VHH | NO.: |
| CV26 | Ab | SARS-CoV1, | | | SARS-CoV2 | S; non- | B-cells; SARS-CoV2 | 721 | QVQLVESGGGVVQPGRSLRLSCAASGF | 1800 |
| | | SARS-CoV2 | | | | RBD | Human Patient | | TFSSYAMHWVRQAPGKGLEWVAVISY | |
| | | | | | | | | | DGSNKYYADSVKGRFTISRDNSKNTLYL | |
| | | | | | | | | | QMNSLRAEDTAVYYCARDEAYYDILTGY | |
| | | | | | | | | | INAPKNYYYYGMDVWGQGTTVTVSS | |
| CV27 | Ab | SARS-CoV2 | SARS- | | SARS-CoV2 | S; non- | B-cells; SARS-CoV2 | 722 | QVQLVESGGGVVQPGRSLRLSCAASGF | 1801 |
| | | | CoV1 | | | RBD | Human Patient | | TFSSYAMHWVRQAPGKGLEWVALISYD | |
| | | | | | | | | | GSNKYYADSVKGRFTISRDNSKNTLYLQ | |
| | | | | | | | | | MNSLRAEDTAVYYCARSFGGSYYYGMD | |
| | | | | | | | | | VWGQGTTVTVSS | |
| CV3 | Ab | SARS-CoV1, | | | SARS-CoV2 | S; non- | B-cells; SARS-CoV2 | 723 | QVQLVQSGSELKKPGASVKLSCQASGYS | 1802 |
| | | SARS-CoV2 | | | | RBC | Human Patient | | FTNHAMNWVRQAPGQGLEWMGWIN | |
| | | | | | | | | | TNTGNPTYAQGFTGRFVFSLDTSVSTTYL | |
| | | | | | | | | | HISSLKAEDTAVYYCARASARPGVATNL | |
| | | | | | | | | | DFWGQGTLVVVSS | |
| CV30 | Ab | SARS-CoV2 | SARS- | SARS-CoV2 | | S; RBD | B-cells; SARS-CoV2 | 724 | EVQLVESGGGLIQPGGSLRLSCAASGVI | 1803 |
| | | | CoV1 | | | | Human Patient | | VSSNYMSWVRQAPGKGLEWVSVIYSG | |
| | | | | | | | | | GSTYYADSVKGRFTISRDNSKNTLYLQM | |
| | | | | | | | | | NSLRAEDTAVYYCARDLDVSGGMDVW | |
| | | | | | | | | | GQGTTVTVSS | |
| CV31 | Ab | SARS-CoV1, | | | SARS-CoV2 | S; non- | B-cells; SARS-CoV2 | 725 | QVQLVQSGAEVKKPGASVKVSCKVSGY | 1804 |
| | | SARS-CoV2 | | | | RBD | Human Patient | | TLTELSMHWVRQAPGKGLEWMGGFD | |
| | | | | | | | | | PEDGETIYAQKFQGRVTMTEDTSTDTAY | |
| | | | | | | | | | MELSSLRSEDTAVYYCATAPPYSPPSSWF | |
| | | | | | | | | | DPWGQGTLVTVSS | |
| CV32 | Ab | SARS-CoV2 | SARS- | | SARS-CoV2 | S; non- | B-cells; SARS-CoV2 | 726 | QVQLVQSGAEVKKPGASVKVSCKASGY | 1805 |
| | | | CoV1 | | | RBD | Human Patient | | TFTGYYMHWVRQAPGQGLEWMGWI | |
| | | | | | | | | | NPNSDVTNYAQKFQGRVTMTRDTSIST | |
| | | | | | | | | | AYMELSRLRSDDTAVYYCAREARDYYGS | |
| | | | | | | | | | GSLDYWGQGTLVTVSS | |
| CV33 | Ab | SARS-CoV2 | SARS- | | SARS-CoV2 | S; non- | B-cells; SARS-CoV2 | 727 | QVQLVQSGAEVKKPGASVKVSCKASGY | 1806 |
| | | | CoV1 | | | RBD | Human Patient | | TFTSYDISWVRQAPGQGLEWMGWISA | |
| | | | | | | | | | YNGNTNYAQKLQGRVTMTTDTSTSTAY | |
| | | | | | | | | | MELRSLRSDDTAVYYCARDSVAGIYYYY | |
| | | | | | | | | | GMDVWGQGTTVTVSS | |
| CV34 | Ab | SARS-CoV2 | SARS- | | SARS-CoV2 | S; non- | B-cells; SARS-CoV2 | 728 | QVQLVESGGGVVQPGRSLRLSCAASGF | 1807 |
| | | | CoV1 | | | RBD | Human Patient | | TFSSYAMHWVRQAPGKGLEWVAVISY | |
| | | | | | | | | | DGSNKYYADSVKGRFTISRDNSKNTLYL | |
| | | | | | | | | | QMNSLRAEDTAVYYCARSYGGSYYYGM | |
| | | | | | | | | | DVWGQGTTVTVSS | |
| CV35 | Ab | SARS-CoV2 | SARS- | | SARS-CoV2 | S; non- | B-cells; SARS-CoV2 | 729 | QVQLQESGPGLVKPSETLSLTCTVSGYSI | 1808 |
| | | | CoV1 | | | RBD | Human Patient | | SSGYYWGWIRQPPGKGLEWIGSIYHSG | |
| | | | | | | | | | STYYNPSLKSRVTISVDTSKNQFSLKLSSV | |
| | | | | | | | | | TAADTAVYYCARTPLSLRLRYNWYFDLW | |
| | | | | | | | | | GRGTLVTVSS | |
| CV36 | Ab | SARS-CoV2 | SARS- | | SARS-CoV2 | S; non- | B-cells; SARS-CoV2 | 730 | QVQLVQSGAEVKKPGASVKVSCKASGY | 1809 |
| | | | CoV1 | | | RBD | Human Patient | | TFTGYYMHWVRQAPGQGLEWMGWI | |
| | | | | | | | | | NPNSGGTNYVQKFQGRVTMTRDTSIST | |
| | | | | | | | | | AYMELNRLRSDDTAVYFCARDLTTTAGT | |
| | | | | | | | | | DYYYGMDVWGQGTTVTVSS | |
| CV37 | Ab | SARS-CoV1, | | | SARS-CoV2 | S; non- | B-cells; SARS-CoV2 | 731 | QVQLVQSGAEVKKPGASVKVSCKASGY | 1810 |
| | | SARS-CoV2 | | | | RBD | Human Patient | | TFTSYGISWVRQAPGQGLEWMGWISA | |
| | | | | | | | | | YNGNTNYAQKLQGRVTMTTDTSTSTAY | |
| | | | | | | | | | MELRSLRSDDTAVYYCARARVAYDYIW | |
| | | | | | | | | | GSYRYKAFDYWGQGTLVTVSS | |
| CV38 | Ab | SARS-CoV1, | | | SARS-CoV2 | S; non- | B-cells; SARS-CoV2 | 732 | QVQLVESGGGVVQPGRSLRLSCAASGF | 1811 |
| | | SARS-CoV2 | | | | RBD | Human Patient | | TFSSYAMHWVRQAPGKGLEWVAVISY | |
| | | | | | | | | | DGSNKYYADSVKGRFTISRDNSKNTLYL | |
| | | | | | | | | | QMNSLRAEDTAVYYCARAQTAHYSSSF | |
| | | | | | | | | | DYWGQGTLVTVSS | |
| CV38-113 | Ab | SARS-CoV2 | SARS- | SARS-CoV2 | | S; RBD | B-cells; SARS-CoV2 | | ND | |
| | | | CoV1 | | | | Human Patient | | | |

| | | | | | | SEQ | | SEQ | | |
|---|---|---|---|---|---|---|---|---|---|---|
| | | Heavy V | Heavy J | Light V | Light J | ID | | ID | | |
| Name | VL | Gene | Gene | Gene | Gene | NO.: | CDRH3 | NO.: | CDRL3 | Sources |
| CV26 | DIQMTQSPSSLSASVGDRVTITCRASQ | IGHV3-30- | (Human) | IGKV1-17 | IGKJ3 | 2822 | ARDEAYYDILT | 4024 | LQHNSYPF | Emilie Seydoux et al., |
| | GIRNDLGWYQQKPGKAPKRLIYAASSL | 3 | IGHJ6 | (Human) | (Human) | | GYINAPKNYY | | T | 2020 |
| | QSGVPSRFSGSGSGTEFTLTISSLQPED | (Human) | | | | | YYGMDV | | | (https://www.biorxiv.or |
| | FATYYCLQHNSYPFTFGPGTKVDIK | | | | | | | | | g/content/10.1101/202 |
| | | | | | | | | | | 0.05.12.091298v1) |
| CV27 | QSALTQPASVSGSPGQSITISCTGTSSD | IGHV3-30 | IGHJ6 | IGLV2-14 | IGLJ1 | 2823 | ARSFGGSYYY | 4025 | SSYTSSSTP | Emilie Seydoux et al., |
| | VGGYNYVSWYQQHPGKAPKLMIYDV | (Human) | (Human) | (Human) | (Human) | | GMDV | | YV | 2020 |
| | SNRPSGVSNRFSGSKSGNTASLTISGL | | | | | | | | | (https://www.biorxiv.or |
| | QAEDEADYYCSSYTSSSTPYVFGTGTK | | | | | | | | | g/content/10.1101/202 |
| | VTVL | | | | | | | | | 0.05.12.091298v1) |
| CV3 | DIQMTQSPSSLSASVGDRVTITCRASQ | IGHV7-4- | IGHJ4 | IGKV1-39 | IGKJ3 | 2824 | ARASARPGVA | 4026 | QQSYSNPL | Emilie Seydoux et al., |
| | NIDNYLNWYQQKPGKAPKLLIYAASRL | 1 (Human) | (Human) | (Human) | (Human) | | TNLDF | | T | 2020 |
| | HSGVPSRFSGSGSGTDFTLIISSLQPED | | | | | | | | | (https://www.biorxiv.or |
| | LATYYCQQSYSNPLTFGPGTKVDIR | | | | | | | | | g/content/10.1101/202 |
| | | | | | | | | | | 0.05.12.091298v1) |
| CV30 | EIVLTQSPGTLSLSPGERATLSCRASQS | IGHV3-53 | IGHJ6 | IGKV3-20 | IGKJ2 | 2825 | ARDLDVSGG | 4027 | QQYGSSP | Emilie Seydoux et al., |
| | VSSSYLAWYQQKPGQAPRLLIYGASSR | (Human) | (Human) | (Human) | (Human) | | MDV | | QT | 2020 |
| | ATGIPDRFSGSGSGTDFTLTISRLEPED | | | | | | | | | (https://www.biorxiv.or |
| | FAVYYCQQYGSSPQTFGQGTKLEIK | | | | | | | | | g/content/10.1101/202 |
| | | | | | | | | | | 0.05.12.091298v1); Nich |
| | | | | | | | | | | olas Hurlburt et al., |
| | | | | | | | | | | 2020 |
| | | | | | | | | | | (https://www.biorxiv.or |
| | | | | | | | | | | g/content/10.1101/202 |
| | | | | | | | | | | 0.06.12.148692v1) |
| CV31 | QSVLTQPPSVSAAPGQKVTISCSGSSS | IGHV1-24 | IGHJ5 | IGLV1-51 | IGLJ1 | 2826 | ATAPPYSPPSS | 4028 | GTWDSSLS | Emilie Seydoux et al., |
| | NIGNNYVSWYQQLPGTAPKLLIYDNN | (Human) | (Human) | (Human) | (Human) | | WFDP | | ASYV | 2020 |
| | KRPSGIPDRFSGSKSGTSATLGITGLQT | | | | | | | | | (https://www.biorxiv.or |
| | GDEADYYCGTWDSSLSASYVFGTGTK | | | | | | | | | g/content/10.1101/202 |
| | VTVL | | | | | | | | | 0.05.12.091298v1) |
| CV32 | QSVLTQPPSVSAAPGQKVTISCSGSSS | IGHV1-2 | IGHJ4 | IGLV1-51 | IGLJ3 | 2827 | AREARDYYGS | 4029 | GTWDSSLS | Emilie Seydoux et al., |
| | NIGNNYVSWYQQLPGTAPKLLIYDNN | (Human) | (Human) | (Human) | (Human) | | GSLDY | | AVV | 2020 |
| | KRPSGIPDRFSGSKSGTSATLGITGLQT | | | | | | | | | (https://www.biorxiv.or |
| | GDEADYYCGTWDSSLSAVVFGGGTKL | | | | | | | | | g/content/10.1101/202 |
| | TVL | | | | | | | | | 0.05.12.091298v1) |
| CV33 | QSVLTQPPSVSGAPGQRVTISCTGSSS | IGHV1-18 | IGHJ6 | IGLV1-40 | IGLJ3 | 2828 | ARDSVAGIYY | 4030 | QSYDSSLS | Emilie Seydoux et al., |
| | NIGAGYDVHWYQQLPGTAPKLLIYGN | (Human) | (Human) | (Human) | (Human) | | YYGMDV | | GPVV | 2020 |
| | SNRPSGVPDRFSGSKSGTSASLAITGL | | | | | | | | | (https://www.biorxiv.or |
| | QAEDEADYYCQSYDSSLSGPVVFGGG | | | | | | | | | g/content/10.1101/202 |
| | TKLTVL | | | | | | | | | 0.05.12.091298v1) |
| CV34 | SYELTQPHSVSVATAQMARITCGGNN | IGHV3-30- | IGHJ6 | IGLV3-12 | IGLJ3 | 2829 | ARSYGGSYYY | 4031 | QVWDSSS | Emilie Seydoux et al., |
| | IGSKAVHWYQQKPGQDPVLVIYSDSN | 3 | (Human) | (Human) | (Human) | | GMDV | | DHVV | 2020 |
| | RPSGIPERFSGSNPGNTATLTISRIEAG | (Human) | | | | | | | | (https://www.biorxiv.or |
| | DEADYYCQVWDSSSDHVVFGGGTKL | | | | | | | | | g/content/10.1101/202 |
| | TVL | | | | | | | | | 0.05.12.091298v1) |
| CV35 | QSVLTQPPSASGTPGQRVTISCSGSSS | IGHV4-38 | IGHJ2 | IGLV1-44 | IGLJ3 | 2830 | ARTPLSLRLRY | 4032 | AAWDDSL | Emilie Seydoux et al., |
| | NIGSNTVNWYQQLPGTAPKLLIYSNN | (Human) | (Human) | (Human) | (Human) | | NWYFDL | | NGPV | 2020 |
| | QRPSGVPDRFSGSKSGTSASLAISGLQ | | | | | | | | | (https://www.biorxiv.or |
| | SEDEADYYCAAWDDSLNGPVFGGGT | | | | | | | | | g/content/10.1101/202 |
| | KLTVL | | | | | | | | | 0.05.12.091298v1) |
| CV36 | SYELTQPPSVSVSPGQTARITCSGDALP | IGHV1-2 | IGHJ6 | IGLV3-25 | IGLJ1 | 2831 | ARDLTTTAGT | 4033 | QSADSSGT | Emilie Seydoux et al., |
| | KQYAYWYQQKPGQAPVLVIYKDTERP | (Human) | (Human) | (Human) | (Human) | | DYYYGMDV | | YMI | 2020 |
| | SGIPERFSGSSSGTTVTLTISGVQAEDE | | | | | | | | | (https://www.biorxiv.or |
| | ADYYCQSADSSGTYMIFGTGTKVTVL | | | | | | | | | g/content/10.1101/202 |
| | | | | | | | | | | 0.05.12.091298v1) |
| CV37 | DIQMTQSPSSLSASVGDRVTITCQASQ | IGHV1-18 | IGHJ4 | IGKV1-33 | IGKJ3 | 2832 | ARARVAYDYI | 4034 | QQYDNLP | Emilie Seydoux et al., |
| | DISNYLNWYQQKPGKAPKLLIYDASNL | (Human) | (Human) | (Human) | (Human) | | WGSYRYKAF | | R | 2020 |
| | ETGVPSRFSGSGSGTDFTFTISSLQPED | | | | | | DY | | | (https://www.biorxiv.or |
| | IATYYCQQYDNLPRFGPGTKVDIKR | | | | | | | | | g/content/10.1101/202 |
| | | | | | | | | | | 0.05.12.091298v1) |
| CV38 | EIVLTQSPATLSLSPGERATLSCRASQS | IGHV3-30 | IGHJ4 | IGKV3-11 | IGKJ5 | 2833 | ARAQTAHYSS | 4035 | QQRSNWP | Emilie Seydoux et al., |
| | VSSYLAWYQQKPGQAPRLLIYDASNR | (Human) | (Human) | (Human) | (Human) | | SFDY | | PIT | 2020 |
| | ATGIPARFSGSGSGTDFTLTISSLEPEDF | | | | | | | | | (https://www.biorxiv.or |
| | AVYYCQQRSNWPPITFGQGTRLEIK | | | | | | | | | g/content/10.1101/202 |
| | | | | | | | | | | 0.05.12.091298v1) |
| CV38-113 | ND | IGHV3-53 | IGHJ4 | ND | ND | 2834 | ARGGRLADA | 4036 | QQYDNLPS | Jakob Kreye et al., 2020 |
| | | (Human) | (Human) | | | | AGDY | | WT | (https://www.biorxiv.or |
| | | | | | | | | | | g/content/10.1101/202 |
| | | | | | | | | | | 0.08.15.252320v1.full.p |
| | | | | | | | | | | df) |

| | | | | | Not | | | | | |
|---|---|---|---|---|---|---|---|---|---|---|
| | Ab | | | Neutral- | Neutral- | | | SEQ | | SEQ |
| | or | | Doesn't | ising | ising | Protein + | | ID | | ID |
| Name | Nb | Binds to | Bind to | Vs | Vs | Epitope | Origin | NO.: | VH or VHH | NO.: |
| CV38-139 | Ab | SARS-CoV2 | SARS- | SARS-CoV2 | | S; RBD | B-cells; SARS-CoV2 | | ND | |
| | | | CoV1 | | | | Human Patient | | | |
| CV38-142 | Ab | SARS-CoV1, | | SARS-CoV2 | | S; RBD | B-cells; SARS-CoV2 | | ND | |
| | | SARS-CoV2 | | | | | Human Patient | | | |
| CV38-183 | Ab | SARS-CoV2 | SARS- | SARS-CoV2 | | S; RBD | B-cells; SARS-CoV2 | | ND | |
| | | | CoV1 | | | | Human Patient | | | |
| CV38-221 | Ab | SARS-CoV2 | SARS- | SARS-CoV2 | | S; RBD | B-cells; SARS-CoV2 | | ND | |
| | | | CoV1 | | | | Human Patient | | | |
| CV39 | Ab | SARS-CoV2 | SARS- | | SARS-CoV2 | S; non- | B-cells; SARS-CoV2 | 733 | QVQLVESGGGVVQPGRSMRLSCAASG | 1812 |
| | | | CoV1 | | | RBD | Human Patient | | FNLSSYAMHWVRQASGKGLEWVSLISY | |
| | | | | | | | | | DGSIKYYADSVKGRFTVSGDNSKNTLFL | |
| | | | | | | | | | QMSSLRADDSALYYCVRGGVSGPNAFD | |
| | | | | | | | | | IWGQGTTVTVSS | |
| CV4 | Ab | SARS-CoV1, | | | SARS-CoV2 | S; non- | B-cells; SARS-CoV2 | 734 | QVQLVESGGGVVQPGRSLRLSCAASGF | 1813 |
| | | SARS-CoV2 | | | | RBD | Human Patient | | TFSSYAMHWVRQAPGKGLEWVAVISY | |
| | | | | | | | | | DGSNKYYADSVKGRFTISRDNSKNTLYL | |
| | | | | | | | | | QMNSLRAEDTAVYYCARSISGSYLGAFD | |
| | | | | | | | | | YWGQGTLVTVSS | |
| CV40 | Ab | SARS-CoV1, | | | SARS-CoV2 | S; non- | B-cells; SARS-CoV2 | 735 | QVQLVQSGAEVKKPGASVKVSCKASGY | 1814 |
| | | SARS-CoV2 | | | | RBD | Human Patient | | TFSSYGISWVRQDPGQGLEWMGWISA | |
| | | | | | | | | | YNGNTNYAQKLQGRVTMTTDTSTSTAY | |
| | | | | | | | | | MELRSLRSDDTAVYYCARVGLWWLGH | |
| | | | | | | | | | PDAFDIWGQGTMVTVSS | |
| CV41 | Ab | SARS-CoV2 | SARS- | | SARS-CoV2 | S; non- | B-cells; SARS-CoV2 | 736 | QVQLVESGGGVVQPGRSLRLSCAASGF | 1815 |
| | | | CoV1 | | | RBD | Human Patient | | TFSSYAMHWVRQAPGKGLEWVAVISY | |
| | | | | | | | | | DGSNKYYADSVKGRFTISRDNSKNTLYL | |
| | | | | | | | | | QMNSLRAEDTAVYYCARTKGGSYFAPF | |
| | | | | | | | | | DYWGQGTLVTVSS | |
| CV42 | Ab | SARS-CoV2 | SARS- | | SARS-CoV2 | S; non- | B-cells; SARS-CoV2 | 737 | QVQLVQSGAEVKKPGASVKVSCKASGY | 1816 |
| | | | CoV1 | | | RBD | Human Patient | | TFTSYGISWVRQAPGQGLEWMGWISA | |
| | | | | | | | | | YNGNTNYAQKVQGRVTMTTDTSTSTAY | |
| | | | | | | | | | MELRSLRSDDTAVYYCARDRGYAATFG | |
| | | | | | | | | | VFDYWGQGTLVTVSS | |
| CV43 | Ab | SARS-CoV2 | SARS- | | SARS-CoV2 | S; RBD | B-cells; SARS-CoV2 | 738 | QVQLVESGGGVVQPGRSLRLSCAASGF | 1817 |
| | | | CoV1 | | | | Human Patient | | TFSSYAMHWVRQAPGKGLEWVAVISY | |
| | | | | | | | | | DGSNKYYADSVKGRFTISRDNSKNTLYL | |
| | | | | | | | | | QMNSLRAEDTAVYYCARVTVVHFDYW | |
| | | | | | | | | | GQGTLVTVSS | |
| CV44 | Ab | SARS-CoV2 | SARS- | | SARS-CoV2 | S; non- | B-cells; SARS-CoV2 | 739 | QVQLVQSGAEVKKPGASVKVSCKASGY | 1818 |
| | | | CoV1 | | | RBD | Human Patient | | TFTSYYMHWVRQAPGQGLEWMGIINP | |
| | | | | | | | | | SGGSTSYAQKFQGRVTMTRDTSTSTVY | |
| | | | | | | | | | MELSSLRSEDTAVYYCARDLTSTSSSPYSY | |
| | | | | | | | | | YYGMDVWGQGTTVTVSS | |
| CV45 | Ab | SARS-CoV1, | | | SARS-CoV2 | S; non- | B-cells; SARS-CoV2 | 740 | QVQLVQSGAEVKKPGASVKVSCKASGY | 1819 |
| | | SARS-CoV2 | | | | RBD | Human Patient | | TFTSYGISWVRQAPGQGLEWMGWISA | |
| | | | | | | | | | YNGNTNYAQKLQGRVTMTTDTSTSTAY | |
| | | | | | | | | | MELRSLRSDDTAVYYCARVTVEAIFGVVI | |
| | | | | | | | | | LPLKNWFDPWGQGTLVTVSS | |
| CV46 | Ab | SARS-CoV2 | SARS- | | SARS-CoV2 | S; non- | B-cells; SARS-CoV2 | 741 | QVQLVESGGGVVQPGRSLRLSCAASGF | 1820 |
| | | | CoV1 | | | RBD | Human Patient | | NLSNYAMHWVRQASGKGLEWVSLISY | |
| | | | | | | | | | DGSIKYYTDSVKGRFTVSGDNSKNTLFLQ | |
| | | | | | | | | | MNSLRPDDSALYYCVRGGVSGPNSFD | |
| | | | | | | | | | MWGQGTTVTVSS | |

| | | | | | | SEQ | | SEQ | | |
|---|---|---|---|---|---|---|---|---|---|---|
| | | Heavy V | Heavy J | Light V | Light J | ID | | ID | | |
| Name | VL | Gene | Gene | Gene | Gene | NO.: | CDRH3 | NO.: | CDRL3 | Sources |
| CV38-139 | ND | IGHV3-53 | IGHJ4 | ND | ND | 2835 | ARGHYDLFDY | 4037 | QQLNSYPP | Jakob Kreye et al., 2020 |
| | | (Human) | (Human) | | | | | | GT | (https://www.biorxiv.or |
| | | | | | | | | | | g/content/10.1101/202 |
| | | | | | | | | | | 0.08.15.252320v1.full.p |
| | | | | | | | | | | df) |
| CV38-142 | ND | IGHV5-51 | IGHJ4 | ND | ND | 2836 | ARIRGVYSSG | 4038 | QQSYSTPR | Jakob Kreye et al., 2020 |
| | | (Human) | (Human) | | | | WIGGDY | | QWT | (https://www.biorxiv.or |
| | | | | | | | | | | g/content/10.1101/202 |
| | | | | | | | | | | 0.08.15.252320v1.full.p |
| | | | | | | | | | | df) |
| CV38-183 | ND | IGHV3-53 | IGHJ6 | ND | ND | 2837 | ARGDGWDN | 4039 | QSYDSSLS | Jakob Kreye et al., 2020 |
| | | (Human) | (Human) | | | | YYYGMDV | | GSV | (https://www.biorxiv.or |
| | | | | | | | | | | g/content/10.1101/202 |
| | | | | | | | | | | 0.08.15.252320v1.full.p |
| | | | | | | | | | | df) |
| CV38-221 | ND | IGHV3-66 | IGHJ4 | ND | ND | 2838 | ARGFGDYYFD | 4040 | QQLYT | Jakob Kreye et al., 2020 |
| | | (Human) | (Human) | | | | Y | | | (https://www.biorxiv.or |
| | | | | | | | | | | g/content/10.1101/202 |
| | | | | | | | | | | 0.08.15.252320v1.full.p |
| | | | | | | | | | | df) |
| CV39 | DVVMTQSPLSLPVTLGQPASISCRSSQ | IGHV3-30 | IGHJ3 | IGKV2-30 | IGKJ1 | 2839 | VRGGVSGPN | 4041 | MQGTHW | Emilie Seydoux et al., |
| | SLVYSDGNTYVNWFQQRPGQSPRRLI | (Human) | (Human) | (Human) | (Human) | | AFDI | | PVT | 2020 |
| | YKVSNRDSGVPDRFSGSGSGTDFALKI | | | | | | | | | (https://www.biorxiv.or |
| | SRVEAEDVGVYYCMQGTHWPVTFGQ | | | | | | | | | g/content/10.1101/202 |
| | GTKVEIK | | | | | | | | | 0.05.12.091298v1) |
| CV4 | DIQMTQSPSTLSASVGDRVTITCRASQ | IGHV3-30 | IGHJ4 | IGKV1-5 | IGKJ2 | 2840 | ARSISGSYLGA | 4042 | QQYNSYT | Emilie Seydoux et al., |
| | SISSWLAWYQQKPGKAPKLLIYKASSL | (Human) | (Human) | (Human) | (Human) | | FDY | | | 2020 |
| | ESGVPSRFSGSGSGTEFTLTISSLQPDD | | | | | | | | | (https://www.biorxiv.or |
| | FATYYCQQYNSYTFGQGTKLEIK | | | | | | | | | g/content/10.1101/202 |
| | | | | | | | | | | 0.05.12.091298v1) |
| CV40 | DIQMTQSPSSLSASVGDRVTITCRASQ | IGHV1-18 | IGHJ3 | IGKV1-17 | IGKJ4 | 2841 | ARVGLWWL | 4043 | LQHNSYPL | Emilie Seydoux et al., |
| | GIRNDLGWYQQKPGKAPKRLIYAASSL | (Human) | (Human) | (Human) | (Human) | | GHPDAFDI | | T | 2020 |
| | QSGVPSRFSGSGSGTEFTLTISSLQPED | | | | | | | | | (https://www.biorxiv.or |
| | FATYYCLQHNSYPLTFGGGTKVEIK | | | | | | | | | g/content/10.1101/202 |
| | | | | | | | | | | 0.05.12.091298v1) |
| CV41 | EIVMTQSPATLSVSPGERATLSCRASQ | IGHV3-30 | IGHJ4 | IGKV3-15 | IGKJ4 | 2842 | ARTKGGSYFA | 4044 | QQYNNWP | Emilie Seydoux et al., |
| | SVSSNLAWYQQKPGQAPRLLIYGAST | (Human) | (Human) | (Human) | (Human) | | PFDY | | LT | 2020 |
| | RATGIPARFSGSGSGTEFTLTISSLQSE | | | | | | | | | (https://www.biorxiv.or |
| | DFAVYYCQQYNNWPLTFGGGTKVEIK | | | | | | | | | g/content/10.1101/202 |
| | | | | | | | | | | 0.05.12.091298v1) |
| CV42 | DIQMTQSPSSLSASVGDRVTITCRASQ | IGHV1-18 | IGHJ4 | IGKV1-39 | IGKJ3 | 2843 | ARDRGYAATF | 4045 | QQTYITAF | Emilie Seydoux et al., |
| | SISSYLNWYQQKPGKAPKFLIYAASSLQ | (Human) | (Human) | (Human) | (Human) | | GVFDY | | T | 2020 |
| | SGVPSRFSGSGSGTDFTLTISSLQPEDF | | | | | | | | | (https://www.biorxiv.or |
| | ATYYCQQTYITAFTFGPGTKVDIK | | | | | | | | | g/content/10.1101/202 |
| | | | | | | | | | | 0.05.12.091298v1) |
| CV43 | NFMLTQPHSVSESPGKTVTISCTGSSG | IGHV3-30 | IGHJ4 | IGLV6-57 | IGLJ3 | 2844 | ARVTVVHFDY | 4046 | QSYDSSN | Emilie Seydoux et al., |
| | SIASNYVQWYQQRPGSAPTTVIYEDN | (Human) | (Human) | (Human) | (Human) | | | | WV | 2020 |
| | QRPSGVPDRFSGSIDSSSNSASLTISGL | | | | | | | | | (https://www.biorxiv.or |
| | KTEDEADYYCQSYDSSNWVFGGGTKL | | | | | | | | | g/content/10.1101/202 |
| | TVL | | | | | | | | | 0.05.12.091298v1) |
| CV44 | SYELTQPPSVSVSPGQTARITCSGDALP | IGHV1-46 | IGHJ6 | IGLV3-25 | IGLJ3 | 2845 | ARDLTSTSSSP | 4047 | QSADSSGT | Emilie Seydoux et al., |
| | KQYAYWYQQKPGQAPVVVIYKDSERP | (Human) | (Human) | (Human) | (Human) | | YSYYYGMDV | | YVV | 2020 |
| | SGIPERFSGSSSGTTVTLTISGVQAEDE | | | | | | | | | (https://www.biorxiv.or |
| | ADYYCQSADSSGTYVVFGGGTKLTVL | | | | | | | | | g/content/10.1101/202 |
| | | | | | | | | | | 0.05.12.091298v1) |
| CV45 | QSVLTQPPSVSGAPGQRVTISCTGSSS | IGHV1-18 | IGHJ5 | IGLV1-40 | IGLJ1 | 2846 | ARVTVEAIFG | 4048 | QSYDSSLT | Emilie Seydoux et al., |
| | NIGAGYDVHWYQQLPGTAPKLLIYGN | (Human) | (Human) | (Human) | (Human) | | VVILPLKNWF | | LYV | 2020 |
| | SNRPSGVPDRFSGSKSGTSASLAITGL | | | | | | DP | | | (https://www.biorxiv.or |
| | QAEDEADYYCQSYDSSLTLYVFGTGTK | | | | | | | | | g/content/10.1101/202 |
| | VTVL | | | | | | | | | 0.05.12.091298v1) |
| CV46 | DVVMTQSPLSLPVTLGQPASISCRSSQ | IGHV3-30 | IGHJ4 | IGKV2-30 | IGKJ1 | 2847 | VRGGVSGPN | 4049 | MQGTHW | Emilie Seydoux et al., |
| | SLVYSDGNTYVNWFQQRPGQSPRRLI | (Human) | (Human) | (Human) | (Human) | | SFDM | | PVT | 2020 |
| | YQVSIRASGVPDRFSGSGSGTDFALKIS | | | | | | | | | (https://www.biorxiv.or |
| | RVEAEDVGVYYCMQGTHWPVTFGQ | | | | | | | | | g/content/10.1101/202 |
| | GTKVEIK | | | | | | | | | 0.05.12.091298v1) |

| | | | | | Not | | | | | |
|---|---|---|---|---|---|---|---|---|---|---|
| | Ab | | | Neutral- | Neutral- | | | SEQ | | SEQ |
| | or | | Doesn't | ising | ising | Protein + | | ID | | ID |
| Name | Nb | Binds to | Bind to | Vs | Vs | Epitope | Origin | NO.: | VH or VHH | NO.: |
| CV47 | Ab | SARS-CoV2 | SARS- | | SARS-CoV2 | S; non- | B-cells; SARS-CoV2 | 742 | QVQLVQSGAEVKKPGASVKVSCKASGY | 1821 |
| | | | CoV1 | | | RBD | Human Patient | | TFTSYGISWVRQAPGQGLEWMGWISA | |
| | | | | | | | | | YSGNTNYAQKLQGRVTMTTDTSTSTAY | |
| | | | | | | | | | MEVRSLRSDDTAVYYCARVGLWWLGH | |
| | | | | | | | | | PDVFDIWGQGTMVTVSS | |
| CV48 | Ab | SARS-CoV2 | | | SARS-CoV2 | S; non- | B-cells; SARS-CoV2 | 743 | QVQLVQSGAEVKKPGSSVKVSCKASGG | 1822 |
| | | | | | | RBD | Human Patient | | TFSSYTINWVRQAPGQGLEWMGRIIPIL | |
| | | | | | | | | | GIADYAQKFQGRVTITADKSTSTAYMEL | |
| | | | | | | | | | SSLRSEDTAVYYCARDLVEDTAMVTGAA | |
| | | | | | | | | | AGTWGQGTLVTVSS | |
| CV5 | Ab | SARS-CoV2 | SARS- | | SARS-CoV2 | S; RBD | B-cells; SARS-CoV2 | 744 | QVQLVQSGAEVKKPGASVKVTCKASGY | 1823 |
| | | | CoV1 | | | | Human Patient | | TFTSYYLHWVRQAPGQGLEWMGIINPS | |
| | | | | | | | | | GGTTSYAQKFQGRVTMTRDTSTSTVYM | |
| | | | | | | | | | ELSSLRSEDTAVYYCARAGRRYSSSDDGA | |
| | | | | | | | | | FDIWGQGTMVTVSS | |
| CV50 | Ab | SARS-CoV2 | | | SARS-CoV2 | S; non- | B-cells; SARS-CoV2 | 745 | QVQLVESGGGVVQPGRSLRLSCAASGF | 1824 |
| | | | | | | RBC | Human Patient | | TFSSYGMHWVRQAPGKGLEWVAVIWY | |
| | | | | | | | | | DGSNKYYADSVKGRFTISRDNSKNTLYL | |
| | | | | | | | | | QMNSLRAEDTAVYYCARDIMFGDDWL | |
| | | | | | | | | | QKQPDYWGQGTLVTVSS | |
| CV7 | Ab | SARS-CoV2 | SARS- | | SARS-CoV2 | S; non- | B-cells; SARS-CoV2 | 746 | QVQLVESGGGVVQPGRSLRLSCAASGF | 1825 |
| | | | CoV1 | | | RBD | Human Patient | | TFSSYAMHWVRQAPGKGLEWVAVISY | |
| | | | | | | | | | DGSNKYYADSVKGRFTISRDNSKNTLYL | |
| | | | | | | | | | QMNSLRAEDTAVYYCARSISGSYLGAFD | |
| | | | | | | | | | YWGQGTLVTVSS | |
| CV8 | Ab | SARS-CoV1, | | | SARS-CoV2 | S; non- | B-cells; SARS-CoV2 | 747 | QVQLVQSGAEVKKPGASVKVSCKASGY | 1826 |
| | | SARS-CoV2 | | | | RBD | Human Patient | | TFTSYGISWVRQAPGQGLEWMGWISA | |
| | | | | | | | | | YNGNTNYAQKLQGRVTMTTDTSTSTAY | |
| | | | | | | | | | MELRSLRSDDTAVYYCARLVPTWASYYD | |
| | | | | | | | | | FWSGYPGGYGMDVWGQGTTVTVSS | |
| CV9 | Ab | SARS-CoV1, | | | SARS-CoV2 | S; non- | B-cells; SARS-CoV2 | 748 | QLQLQESGPGLVKPSETLSLTCTVSGGSI | 1827 |
| | | SARS-CoV2 | | | | RBD | Human Patient | | SSSSYYWGWIRQPPGKGLEWIGSIYYSG | |
| | | | | | | | | | STYYNPSLKSRVTISVDTSKNQFSLKLSSV | |
| | | | | | | | | | TAADTAVYYCATHIVVVTATPNWYFDL | |
| | | | | | | | | | WGRGTLVTVSS | |
| EY6A | Ab | SARS-CoV2 | | SARS-CoV2 | | S; RBD | B-cells; SARS-CoV2 | 749 | EVQLVESGGGVVQPGRSLRLSCAASAFT | 1828 |
| | | | | | | | Human Patient | | FSSYDMHWVRQAPGKGLEWVAVISYD | |
| | | | | | | | | | GSNKYYADSVKGRFTISRDNSKNTLYLQ | |
| | | | | | | | | | MNSLRAEDTAVYYCAKDGGKLWVYYFD | |
| | | | | | | | | | YWGQGTLVTVSS | |
| Fab 2-4 | Ab | SARS-CoV2 | | SARS-CoV2 | | S; RBD | B-cells; SARS-CoV2 | 750 | QVQLVQSGAEVKKPGASVKVSCKASGY | 1829 |
| | | | | | | | Human Patient | | TFTGYYMHWVRQAPGQGLEWMGWI | |
| | | | | | | | | | NPNSGGTNYTQMFQGRVTMTRDTSIST | |
| | | | | | | | | | AYMEVSRLRSDDTAVYYCARDRSWAVV | |
| | | | | | | | | | YYYMDVWGKGTTVTVSS | |
| FnC1t1p2 | Ab | SARS-CoV2 | | SARS-CoV2 | | S; S1 non- | B-cells; SARS-CoV2 | 751 | QVQLVQSGAEVKKPGASVKVSCKASGY | 1830 |
| A5 | | | | | | RBD | Human Patient | | TFTSYDINWVRQATGQGLEWMGWMN | |
| | | | | | | | | | PNSGNTGYAQKFQGRVTMTRNTSISTA | |
| | | | | | | | | | YMELSSLRSEDTAVYYCARATTDCSSTSC | |
| | | | | | | | | | WSLDFWSGYYTGGREKIFDWGQGTLVT | |
| | | | | | | | | | VSS | |
| FnC1t2p1 | Ab | SARS-CoV2 | | SARS-CoV2 | | S; RBD | B-cells; SARS-CoV2 | 752 | QVQLVQSGSELKKPGASVKVSCKASGYT | 1831 |
| D4 | | | | | | | Human Patient | | FLRFAMNWLRQAPGQGLEWMGWIDT | |
| | | | | | | | | | NTGTPTYAQGFTGRFVFSLDTSVSTAYL | |
| | | | | | | | | | QISSLKAEDTAVYYCARSLRGANLVPWG | |
| | | | | | | | | | QGTLVTVSS | |
| FnC1t2p1 | Ab | SARS-CoV2 | | SARS-CoV2 | | S; RBD | B-cells; SARS-CoV2 | 753 | QVQLVQSGSELKKPGASVKVSCKASGYT | 1832 |
| G5 | | | | | | | Human Patient | | FLRFAMNWLRQAPGQGLEWMGWIDT | |
| | | | | | | | | | NTGTPTYAQGFTGRFVFSLDTSVSTAYL | |
| | | | | | | | | | QISSLKAEDTAVYYCARSLRGANLVPWG | |
| | | | | | | | | | QGTLVTVSS | |
| H014 | Ab | SARS-CoV1, | | SARS-CoV1, | | S; RBD | Immunised | | ND | |
| | | SARS-CoV2 | | SARS-CoV2 | | | Humanised (hACE2) | | | |
| | | | | | | | Mouse | | | |
| H11-D4 | Nb | SARS-CoV2 | | SARS-CoV2 | | S; RBD | Phage Display | 754 | QVQLVESGGGLMQAGGSLRLSCAVSGR | |
| | | | | | | | Library (Nanobody, | | TFSTAAMGWFRQAPGKEREFVAAIRWS | |
| | | | | | | | non-immune) | | GGSAYYADSVKGRFTISRDKAKNTVYLQ | |
| | | | | | | | | | MNSLKYEDTAVYYCARTENVRSLLSDYA | |
| | | | | | | | | | TWPYDYWGQGTQVTVSS | |

| | | | | | | SEQ | | SEQ | | |
|---|---|---|---|---|---|---|---|---|---|---|
| | | Heavy V | Heavy J | Light V | Light J | ID | | ID | | |
| Name | VL | Gene | Gene | Gene | Gene | NO.: | CDRH3 | NO.: | CDRL3 | Sources |
| CV47 | DIQMTQSPSSLSASVGDRVTITCRASQ | IGHV1-18 | IGHJ3 | IGKV1-17 | IGKJ4 | 2848 | ARVGLWWL | 4050 | LQHNSYPL | Emilie Seydoux et al., |
| | GIRNDLGWYQQKPGKAPKRLIYAASSL | (Human) | (Human) | (Human) | (Human) | | GHPDVFDI | | T | 2020 |
| | QSGVPSRFSGSGSGTEFTLTISSLQPED | | | | | | | | | (https://www.biorxiv.or |
| | FATYYCLQHNSYPLTFGGGTKVEIK | | | | | | | | | g/content/10.1101/202 |
| | | | | | | | | | | 0.05.12.091298v1) |
| CV48 | DVVMTQSPLSLPVTLGQPASISCRSSQ | IGHV1-69 | IGHJ4 | IGKV2-30 | IGKJ1 | 2849 | ARDLVEDTA | 4051 | MQGTHW | Emilie Seydoux et al., |
| | SLVYSDGNTYLNWFQQRPGQSPRRLI | (Human) | (Human) | (Human) | (Human) | | MVTGAAAGT | | PPT | 2020 |
| | YKVSNRDSGVPDKFSGSGSGTDFTLKI | | | | | | | | | (https://www.biorxiv.or |
| | SRVEAEDVGVYYCMQGTHWPPTFGQ | | | | | | | | | g/content/10.1101/202 |
| | GTKVEIK | | | | | | | | | 0.05.12.091298v1) |
| CV5 | DIVMTQSPDSLAVSLGERATINCKSSQ | IGHV1-46 | IGHJ3 | IGKV4-1 | IGKJ2 | 2850 | ARAGRRYSSS | 4052 | QQYYITPYT | Emilie Seydoux et al., |
| | NVLYSSNNKNYLAWYQQKPGQPPKLL | (Human) | (Human) | (Human) | (Human) | | DDGAFDI | | | 2020 |
| | IYWASTRESGVPDRFSGSGSGTDFTLTI | | | | | | | | | (https://www.biorxiv.or |
| | SSLQAEDVAVYYCQQYYITPYTFGQGT | | | | | | | | | g/content/10.1101/202 |
| | KLEIK | | | | | | | | | 0.05.12.091298v1) |
| CV50 | SYELTQPPSVSVSPGQTARITCSGDALP | IGHV3-33 | IGHJ4 | IGLV3-10 | IGLJ1 | 2851 | ARDIMFGDD | 4053 | YSTDSSGN | Emilie Seydoux et al., |
| | KKYAYWYQQKSGQAPVLVIYEDSKRP | (Human) | (Human) | (Human) | (Human) | | WLQKQPDY | | LYV | 2020 |
| | SGIPERFSGSSSGTMATLTISGAQVED | | | | | | | | | (https://www.biorxiv.or |
| | EADYYCYSTDSSGNLYVFGTGTKVTVL | | | | | | | | | g/content/10.1101/202 |
| | | | | | | | | | | 0.05.12.091298v1) |
| CV7 | DIQMTQSPSTLSASVGDRVTITCRASQ | IGHV3-30 | IGHJ4 | IGKV1-5 | IGKJ2 | 2852 | ARSISGSYLGA | 4054 | QQYNSYT | Emilie Seydoux et al., |
| | SISSWLAWYQQKPGKAPKLLIYKASSL | (Human) | (Human) | (Human) | (Human) | | FDY | | | 2020 |
| | ESGVPSRFSGSGSGTEFTLTISSLQPDD | | | | | | | | | (https://www.biorxiv.or |
| | FATYYCQQYNSYTFGQGTKLEIK | | | | | | | | | g/content/10.1101/202 |
| | | | | | | | | | | 0.05.12.091298v1) |
| CV8 | EIVLTQSPGTLSLSPGERATLSCRASQS | IGHV1-18 | IGHJ6 | IGKV3-20 | IGKJ5 | 2853 | ARLVPTWASY | 4055 | QQYGSSP | Emilie Seydoux et al., |
| | VSSSYLAWYQQKPGQAPRLLIYGASSR | (Human) | (Human) | (Human) | (Human) | | YDFWSGYPG | | GT | 2020 |
| | ATGIPDRFSGSGSGTDFTLTISRLEPED | | | | | | GYGMDV | | | (https://www.biorxiv.or |
| | FAVYYCQQYGSSPGTFGQGTRLEIK | | | | | | | | | g/content/10.1101/202 |
| | | | | | | | | | | 0.05.12.091298v1) |
| CV9 | QSALTQPASVSGSPGQSITISCTGTSSD | IGHV4-39 | IGHJ2 | IGLV2-14 | IGLJ3 | 2854 | ATHIVVVTAT | 4056 | SSYTSISTW | Emilie Seydoux et al., |
| | VGGYNYVSWYQQHPGKAPKLMIYDV | (Human) | (Human) | (Human) | (Human) | | PNWYFDL | | V | 2020 |
| | SNRPSGVSNRFSGSKSGNTASLTISGL | | | | | | | | | (https://www.biorxiv.or |
| | QAEDEADYYCSSYTSISTWVFGGGTKL | | | | | | | | | g/content/10.1101/202 |
| | TVL | | | | | | | | | 0.05.12.091298v1) |
| EY6A | DIQMTQSPSSLSASVGDRVTITCRASQ | IGHV3-30- | IGHJ4 | IGKV1-39 | IGKJ4 | 2855 | AKDGGKLWV | 4057 | QQSYSTLA | Daming Zhou et al., |
| | SISSYLNWYQQKPGKAPKLLIYAASSLQ | 3 | (Human) | (Human) | (Human) | | YYFDY | | LT | 2020 |
| | SGVPSRFSGSGSGTDFTLTISSLQPEDF | (Human) | | | | | | | | (https://www.biorxiv.or |
| | ATYYCQQSYSTLALTFGGGTKVEIK | | | | | | | | | g/content/10.1101/202 |
| | | | | | | | | | | 0.06.12.148387v1) |
| Fab 2-4 | QSALTQPPSASGSPGQSVTISCTGTSS | IGHV1-2 | IGHJ6 | IGLV2-8 | IGLJ3 | 2856 | ARDRSWAVV | 4058 | SSYAGSNN | David Ho et al., 2020 |
| | DVGGYNYVSWYQQHPGKAPKLMIYE | (Human) | (Human) | (Human) | (Human) | | YYYMDV | | LV | (https://www.biorxiv.or |
| | VSKRPSGVPDRFSGSKSGNTASLTVSG | | | | | | | | | g/content/10.1101/202 |
| | LQAEDEADYYCSSYAGSNNLVFGGGT | | | | | | | | | 0.06.17.153486v1) |
| | KLTVL | | | | | | | | | |
| FnC1t1p2 | EIVLTQSPGTLSLSPGERATLSCRASQS | IGHV1-8 | IGHJ4 | IGKV3-20 | IGKJ1 | 2857 | ARATTDCSST | 4059 | QQYGSSP | Christoph Kreer et al., |
| A5 | VSSSYLAWYQQKPGQAPRLLIYGASSR | (Human) | (Human) | (Human) | (Human) | | SCWSLDFWS | | GT | 2020 |
| | ATGIPDRFSGSGSGTDFTLTISRLEPED | | | | | | GYYTGGREKI | | | (https://doi.org/10.101 |
| | FAVYYCQQYGSSPGTFGQGTKVEIK | | | | | | FD | | | 6/j.cell.2020.06.044) |
| FnC1t2p1 | DIQMTQSPSSLSASVGDRVTITCQASQ | IGHV7-4- | IGHJ5 | IGKV1-33 | IGKJ4 | 2858 | ARSLRGANLV | 4060 | QQYDNLPL | (https://doi.org/10.101 |
| D4 | DVSNYLNWYQQQPGKAPKLLIYDAFN | 1 (Human) | (Human) | (Human) | (Human) | | P | | T | Christoph Kreer et al., |
| | LETGVPSRFSGSGSGTDFTFTISSLQPE | | | | | | | | | 2020 |
| | DIATYYCQQYDNLPLTFGGGTKVEIK | | | | | | | | | 6/j.cell.2020.06.044) |
| FnC1t2p1 | DIQMTQSPSSLSASVGDRVTITCQASQ | IGHV7-4- | IGHJ5 | IGKV1-33 | IGKJ4 | 2859 | ARSLRGANLV | 4061 | QQYDNLPL | Christoph Kreer et al., |
| G5 | DVSNYLNWYQQQPGKAPKLLIYDAFN | 1 (Human) | (Human) | (Human) | (Human) | | P | | T | 2020 |
| | LETGVPSRFSGSGSGTDFTFTISSLQPE | | | | | | | | | (https://doi.org/10.101 |
| | DIATYYCQQYDNLPLTFGGGTKVEIK | | | | | | | | | 6/j.cell.2020.06.044) |
| H014 | ND | ND | ND | ND | ND | | ND | | ND | Zhe Lv et al., 2020 |
| | | | | | | | | | | (https://www.biorxiv.or |
| | | | | | | | | | | g/content/10.1101/202 |
| | | | | | | | | | | 0.06.02.129098v2) |
| H11-D4 | N/A | IGHV3-3 | (Alpaca) | N/A | N/A | 2860 | ARTENVRSLL | | N/A | Jiangdong Huo et al., |
| | | (Alpaca) | IGHJ4 | | | | SDYATWPYDY | | | 2020 |
| | | | | | | | | | | (https://www.nature.co |
| | | | | | | | | | | m/articles/s41594-020- |
| | | | | | | | | | | 0469-6) |

| | | | | | Not | | | | | |
|---|---|---|---|---|---|---|---|---|---|---|
| | Ab | | | Neutral- | Neutral- | | | SEQ | | SEQ |
| | or | | Doesn't | ising | ising | Protein + | | ID | | ID |
| Name | Nb | Binds to | Bind to | Vs | Vs | Epitope | Origin | NO.: | VH or VHH | NO.: |
| H11-H4 | Nb | SARS-CoV2 | | SARS-CoV2 | | S; RBD | Phage Display | 755 | QVQLVESGGGLMQAGGSLRLSCAVSGR | |
| | | | | | | | Library (Nanobody, | | TFSTAAMGWFRQAPGKEREFVAAIRWS | |
| | | | | | | | non-immune) | | GGSAYYADSVKGRFTISRDKAKNTVYLQ | |
| | | | | | | | | | MNSLKYEDTAVYYCAQTHYVSYLLSDYA | |
| | | | | | | | | | TWPYDYWGQGTQVTVSS | |
| H4 | Ab | SARS-CoV2 | | SARS-CoV2 | | S; RBD | B-cells; SARS-CoV2 | 756 | QVQLVQSGAEVKKPGASVKVSCKASGY | 1833 |
| | | | | | | | Human Patient | | TFTGYYMHWVRQAPGQGLEWMGRIN | |
| | | | | | | | | | PNSGGTNYAQKFQGRVTMTRDTSISTA | |
| | | | | | | | | | YMELSRLRSDDTAVYYCARVPYCSSTSCH | |
| | | | | | | | | | RDWYFDLWGRGTLVTVSS | |
| HbnC2t1 | Ab | SARS-CoV2 | | SARS-CoV2 | | S; RBD | B-cells; SARS-CoV2 | 757 | QVQLVESGGGVVQPGRSLRLSCAASGF | 1834 |
| p2_D9 | | | | | | | Human Patient | | TFSSYGMHWVRQAPGKGLEWVAVIWY | |
| | | | | | | | | | DGRNKYYVDSVKGRFTISRDNSKNTLYL | |
| | | | | | | | | | QISSLRAEDTAVYYCARAARRPVVTDTM | |
| | | | | | | | | | AYYMDVWGKGTTVTVSS | |
| HbnC3t1 | Ab | SARS-CoV2 | | SARS-CoV2 | | S; RBD | B-cells; SARS-CoV2 | 758 | QMQLVQSGPEVKKPGTSVKVSCKASGF | 1835 |
| p1_C6 | | | | | | | Human Patient | | TFTSSAVQWVRQARGQRLEWIGWIVV | |
| | | | | | | | | | GSGNTNYAQKFQERVTITRDMSTSTAY | |
| | | | | | | | | | MELSSLRSEDTAVYYCAAPHCSSTICYDG | |
| | | | | | | | | | FDIWGQGTMVTVSS | |
| HbnC3t1 | Ab | SARS-CoV2 | | SARS-CoV2 | | S; RBD | B-cells; SARS-CoV2 | 759 | QVQLVESGGGVVQPGRSLRLSCAATGF | 1836 |
| p1_F4 | | | | | | | Human Patient | | TFRRYGMHWVRQAPGKGLEWVAGILF | |
| | | | | | | | | | DGSNKYYVDSVKGRFTISRDSSRNTLYLQ | |
| | | | | | | | | | LNSLRREDTAVYYCAKGGDYEWELLES | |
| | | | | | | | | | WGQGTLVTVSS | |
| HbnC3t1 | Ab | SARS-CoV2 | | SARS-CoV2 | | S; RBD | B-cells; SARS-CoV2 | 760 | EVQLVESGGGLVQPGGSLRLSCAASGFT | 1837 |
| p1_G4 | | | | | | | Human Patient | | VSSNYMSWVRQAPGKGLEWVSVIYSG | |
| | | | | | | | | | GSTFYADSVKGRFTISRDNSKNTLYLQM | |
| | | | | | | | | | NSLRAEDTAVYYCARDFGDFFFDYWGQ | |
| | | | | | | | | | GTLVTVSS | |
| HbnC3t1 | Ab | SARS-CoV2 | | SARS-CoV2 | | S; RBD | B-cells; SARS-CoV2 | 761 | EVQLVESGGGLVQPGGSLRLSCAASGFI | 1838 |
| p2_B10 | | | | | | | Human Patient | | VSSNYMSWVRQAPGKGLEWVSVIYSG | |
| | | | | | | | | | GSTFYADSVKGRFTISRDNSKNTLYLQM | |
| | | | | | | | | | NSLRAEDTAVYYCARDYGDYFFDYWGQ | |
| | | | | | | | | | GTLVTVSS | |
| HbnC3t1 | Ab | SARS-CoV2 | | SARS-CoV2 | | S; RBD | B-cells; SARS-CoV2 | 762 | QMQLVQSGPEVKKPGTSVKVSCKASGF | 1839 |
| p2_C6 | | | | | | | Human Patient | | TFSSSAVQWVRQARGQRLEWIGWIVV | |
| | | | | | | | | | GSGNTNYAQKFQGRVTITRDMSTRTAY | |
| | | | | | | | | | MELSSLRSEDTAMYYCAAPYCSSTRCYD | |
| | | | | | | | | | AFDIWGQGTMVTVSS | |
| HbnC4t1 | Ab | SARS-CoV2 | | SARS-CoV2 | | S; RBD | B-cells; SARS-CoV2 | 763 | EVQLVESGGGLVQPGRSLRLSCAASGFT | 1840 |
| p1_D5 | | | | | | | Human Patient | | FDDYAMHWVRQAPGKGLEWVSGISW | |
| | | | | | | | | | NSGSIGYADSVKGRFTISRDNAKNSLYLQ | |
| | | | | | | | | | MNSLRAEDTGLYYCAKDINYDSGGYHK | |
| | | | | | | | | | NYFDYWGQGTLVTVSS | |
| Ju et | Ab | SARS-CoV2 | | SARS-CoV2 | SARS-CoV2 | S; Various | B-cells; SARS-CoV2 | | 205 | |
| al., | | | | | | | Human Patient | | | |
| 2020 | | | | | | | | | | |
| Kim et | Ab | SARS-CoV2 | | SARS-CoV2 | | S; RBD | B-cells; SARS-CoV2 | | Various | |
| al., | | | | | | | Human Patient | | | |
| 2020 | | | | | | | | | | |
| LR1 | Nb | SARS-CoV2 | | | | S; RBD | Phage Display | 764 | QVQLVESGGGSVQAGGSLRLSCAASGSI | |
| | | | | | | | Library (Nanobody, | | SSITYLGWFRQAPGKEREGVAALITDSG | |
| | | | | | | | non-immune) | | RTYYADSVKGRFTVSLDNAKNTVYLQM | |
| | | | | | | | | | NSLKPEDTALYYCAAAEWGYEWPLYYAS | |
| | | | | | | | | | SWYWGQGTQVTVSS | |
| LR11 | Nb | SARS-CoV2 | | | | S; RBD | Phage Display | 765 | QVQLVESGGGSVQAGGSLRLSCAASGSI | |
| | | | | | | | Library (Nanobody, | | SSITYLGWFRQAPGKEREGVAALITDSG | |
| | | | | | | | non-immune) | | RTYYADSVKGRFTVSLDNAKNTVYLQM | |
| | | | | | | | | | NSLKPEDTALYYCAAAEWGYEWPLYYAS | |
| | | | | | | | | | SWYWGQGTQVTVSS | |
| LR15 | Nb | SARS-CoV2 | | | | S; RBD | Phage Display | 766 | QVQLVESGGGSVQAGGSLRLSCAASGSI | |
| | | | | | | | Library (Nanobody, | | SSITYLGWFRQAPGKEREGVAALITDSG | |
| | | | | | | | non-immune) | | RTYYADSVKGRFTVSLDNAKNTVYLQM | |
| | | | | | | | | | NSLKPEDTALYYCAAAEWGYEWPLYYAS | |
| | | | | | | | | | SWYWGQGTQVTVSS | |

| | | | | | | SEQ | | SEQ | | |
|---|---|---|---|---|---|---|---|---|---|---|
| | | Heavy V | Heavy J | Light V | Light J | ID | | ID | | |
| Name | VL | Gene | Gene | Gene | Gene | NO.: | CDRH3 | NO.: | CDRL3 | Sources |
| H11-H4 | N/A | IGHV3-3 | IGHJ4 | N/A | N/A | 2861 | AQTHYVSYLL | | N/A | Jiangdong Huo et al., |
| | | (Alpaca) | (Alpaca) | | | | SDYATWPYDY | | | 2020 |
| | | | | | | | | | | (https://www.nature.co |
| | | | | | | | | | | m/articles/s41594-020- |
| | | | | | | | | | | 0469-6) |
| H4 | DIQMTQSPLSLPVTPGEPASISCRSSQS | IGHV1-2 | IGHJ2 | IGKV2-40 | IGKJ4 | 2862 | ARVPYCSSTSC | 4062 | MQRIEFPL | Yan Wu et al., 2020 |
| | LLDSDDGNTYLDWYLQKPGQSPQLLIY | (Human) | (Human) | (Human) | (Human) | | HRDWYFDL | | T | (https://science.science |
| | TLSYRASGVPDRFSGSGSGTDFTLKISR | | | | | | | | | mag.org/content/early/ |
| | VEAEDVGVYYCMQRIEFPLTFGGGTK | | | | | | | | | 2020/05/12/science.abc |
| | VEIK | | | | | | | | | 2241) |
| HbnC2t1 | EIVLTQSPATLSLSPGERATLSCRASLSL | IGHV3-33 | IGHJ6 | IGKV3-11 | IGKJ1 | 2863 | ARAARRPVVT | 4063 | QQRSNWP | Christoph Kreer et al., |
| p2_D9 | SSYLAWYQQKPGQAPRLLIYDASNRA | (Human) | (Human) | (Human) | (Human) | | DTMAYYMDV | | PTWT | 2020 |
| | TGIPARFSGSGSGTDFTLTISSLEPEDFA | | | | | | | | | (https://doi.org/10.101 |
| | VYYCQQRSNWPPTWTFGQGTKAEIK | | | | | | | | | 6/j.cell.2020.06.044) |
| HbnC3t1 | EIVLTQSPGTLSLSPGERATLSCRASQS | IGHV1-58 | IGHJ3 | IGKV3-20 | IGKJ1 | 2864 | AAPHCSSTICY | 4064 | QQYGSSP | Christoph Kreer et al., |
| p1_C6 | VSSSYLAWYQQKPGQAPRLLIYGASSR | (Human) | (Human) | (Human) | (Human) | | DGFDI | | WT | 2020 |
| | ATGIPDRFSGSGSGTDFTLTISRVEPED | | | | | | | | | (https://doi.org/10.101 |
| | FAVYYCQQYGSSPWTFGQGTKVEIK | | | | | | | | | 6/j.cell.2020.06.044) |
| HbnC3t1 | DIQMTQSPSTVSASVGDRVTITCRASQ | IGHV3-30 | IGHJ5 | IGKV1-5 | IGKJ4 | 2865 | AKGGDYEWE | 4065 | QHYHSFP | (https://doi.org/10.101 |
| p1_F4 | SIDNWLAWYQEKPGKAPKVLIYKASSL | (Human) | (Human) | (Human) | (Human) | | LLES | | LT | Christoph Kreer et al., |
| | ESGVPSRFSGRGSGTEFTLTISSLQPGD | | | | | | | | | 2020 |
| | FATYYCQHYHSFPLTFGGGTKVDIK | | | | | | | | | 6/j.cell.2020.06.044) |
| HbnC3t1 | EIVLTQSPGTLSLSPGERATLSCRASQS | IGHV3-66 | IGHJ4 | IGKV3-20 | IGKJ1 | 2866 | ARDFGDFFFD | 4066 | QQYGSSP | Christoph Kreer et al., |
| p1_G4 | VSSYLAWYQQKPGQAPRLLIYGVSSRA | (Human) | (Human) | (Human) | (Human) | | Y | | RT | 2020 |
| | TGIPDRFSGSGSGTDFTLTISRLEPEDF | | | | | | | | | (https://doi.org/10.101 |
| | AVYYCQQYGSSPRTFGQGTKVEIK | | | | | | | | | 6/j.cell.2020.06.044) |
| HbnC3t1 | EIVLTQSPGTLSLSPGERATLSCRASQS | IGHV3-66 | IGHJ4 | IGKV3-20 | IGKJ2 | 2867 | ARDYGDYFFD | 4067 | QQYGSSP | (https://doi.org/10.101 |
| p2_B10 | VSSYLAWYQQKPGQAPRLLISGASSRA | (Human) | (Human) | (Human) | (Human) | | Y | | RT | Christoph Kreer et al., |
| | AGIPDRFSGSGSGTDFTLTINRLEPEDF | | | | | | | | | 2020 |
| | AVYYCQQYGSSPRTFGQGTKLEIK | | | | | | | | | 6/j.cell.2020.06.044) |
| HbnC3t1 | EIVLTQSPGTLSLSPGERATLSCRASQS | IGHV1-58 | IGHJ3 | IGKV3-20 | IGKJ1 | 2868 | AAPYCSSTRC | 4068 | QQYGRSP | Christoph Kreer et al., |
| p2_C6 | VSSSYLAWYQQKPGQAPRLLIYGASSR | (Human) | (Human) | (Human) | (Human) | | YDAFDI | | WT | 2020 |
| | ATGIPDRFSGSGSGTDFTLTISRLEPED | | | | | | | | | (https://doi.org/10.101 |
| | FAVYYCQQYGRSPWTFGQGTKVEI | | | | | | | | | 6/j.cell.2020.06.044) |
| HbnC4t1 | DIQMTQSPSSLSASVGDRATITCRASQ | IGHV3-9 | IGHJ4 | IGKV1-39 | IGKJ4 | 2869 | AKDINYDSGG | 4069 | QQSYSNP | Christoph Kreer et al., |
| p1_D5 | SISSYLNWYQEKPGKAPKLLIYAASSLQ | (Human) | (Human) | (Human) | (Human) | | YHKNYFDY | | LT | 2020 |
| | SGVPSRFSGSGSGTDFTLTISSLQPEDF | | | | | | | | | (https://doi.org/10.101 |
| | ATYYCQQSYSNPLTFGGGTKVEIK | | | | | | | | | 6/j.cell.2020.06.044) |
| Ju et | 205 | Various | Various | Various | Various | | Various | | Various | Bin Ju et al., 2020 |
| al., | | | | | | | | | | (https://www.nature.co |
| 2020 | | | | | | | | | | m/articles/s41586-020- |
| | | | | | | | | | | 2380-z) |
| Kim et | Various | Various | Various | Various | Various | | Various | | Various | Sang II Kim et al., 2020 |
| al., | | | | | | | | | | (https://www.biorxiv.or |
| 2020 | | | | | | | | | | g/content/10.1101/202 |
| | | | | | | | | | | 0.06.26.174557v2) |
| LR1 | N/A | IGHV3-3 | IGHJ4 | N/A | N/A | 2870 | AAAEWGYE | | N/A | Tingting Li et al., 2020 |
| | | (Alpaca) | (Alpaca) | | | | WPLYYASSW | | | (https://www.biorxiv.or |
| | | | | | | | Y | | | g/content/10.1101/202 |
| | | | | | | | | | | 0.06.09.143438v1) |
| LR11 | N/A | IGHV3-3 | IGHJ4 | N/A | N/A | 2871 | AAAYWGWD | | N/A | Tingting Li et al., 2020 |
| | | (Alpaca) | (Alpaca) | | | | WPLNSQDYW | | | (https://www.biorxiv.or |
| | | | | | | | Y | | | g/content/10.1101/202 |
| | | | | | | | | | | 0.06.09.143438v1) |
| LR15 | N/A | IGHV3-3 | IGHJ4 | N/A | N/A | 2872 | AAADWGYN | | N/A | Tingting Li et al., 2020 |
| | | (Alpaca) | (Alpaca) | | | | WPLIREEYEY | | | (https://www.biorxiv.or |
| | | | | | | | | | | g/content/10.1101/202 |
| | | | | | | | | | | 0.06.09.143438v1) |

| | | | | | Not | | | | | |
|---|---|---|---|---|---|---|---|---|---|---|
| | Ab | | | Neutral- | Neutral- | | | SEQ | | SEQ |
| | or | | Doesn't | ising | ising | Protein + | | ID | | ID |
| Name | Nb | Binds to | Bind to | Vs | Vs | Epitope | Origin | NO.: | VH or VHH | NO.: |
| LR16 | Nb | SARS-CoV2 | | | | S; RBD | Phage Display | 767 | QVQLVESGGGSVQAGGSLRLSCAASGSI | |
| | | | | | | | Library (Nanobody, | | SSITYLGWFRQAPGKEREGVAALITDSG | |
| | | | | | | | non-immune) | | RTYYADSVKGRFTVSLDNAKNTVYLQM | |
| | | | | | | | | | NSLKPEDTALYYCAAAEWGYEWPLYYAS | |
| | | | | | | | | | SWYWGQGTQVTVSS | |
| LR2 | Nb | SARS-CoV2 | | | | S; RBD | Phage Display | 768 | QVQLVESGGGSVQAGGSLRLSCAASGSI | |
| | | | | | | | Library (Nanobody, | | SSITYLGWFRQAPGKEREGVAALITDSG | |
| | | | | | | | non-immune) | | RTYYADSVKGRFTVSLDNAKNTVYLQM | |
| | | | | | | | | | NSLKPEDTALYYCAAAEWGYEWPLYYAS | |
| | | | | | | | | | SWYWGQGTQVTVSS | |
| LR3 | Nb | SARS-CoV2 | | | | S; RBD | Phage Display | 769 | QVQLVESGGGSVQAGGSLRLSCAASGSI | |
| | | | | | | | Library (Nanobody, | | SSITYLGWFRQAPGKEREGVAALITDSG | |
| | | | | | | | non-immune) | | RTYYADSVKGRFTVSLDNAKNTVYLQM | |
| | | | | | | | | | NSLKPEDTALYYCAAAEWGYEWPLYYAS | |
| | | | | | | | | | SWYWGQGTQVTVSS | |
| LR5 | Nb | SARS-CoV2 | | | | S; RBD | Phage Display | 770 | QVQLVESGGGSVQAGGSLRLSCAASGSI | |
| | | | | | | | Library (Nanobody, | | SSITYLGWFRQAPGKEREGVAALITDSG | |
| | | | | | | | non-immune) | | RTYYADSVKGRFTVSLDNAKNTVYLQM | |
| | | | | | | | | | NSLKPEDTALYYCAAAEWGYEWPLYYAS | |
| | | | | | | | | | SWYWGQGTQVTVSS | |
| LR6 | Nb | SARS-CoV2 | | | | S; RBD | Phage Display | 771 | QVQLVESGGGSVQAGGSLRLSCAASGSI | |
| | | | | | | | Library (Nanobody, | | SSITYLGWFRQAPGKEREGVAALITDSG | |
| | | | | | | | non-immune) | | RTYYADSVKGRFTVSLDNAKNTVYLQM | |
| | | | | | | | | | NSLKPEDTALYYCAAAEWGYEWPLYYAS | |
| | | | | | | | | | SWYWGQGTQVTVSS | |
| LR7 | Nb | SARS-CoV2 | | | | S; RBD | Phage Display | 772 | QVQLVESGGGSVQAGGSLRLSCAASGSI | |
| | | | | | | | Library (Nanobody, | | SSITYLGWFRQAPGKEREGVAALITDSG | |
| | | | | | | | non-immune) | | RTYYADSVKGRFTVSLDNAKNTVYLQM | |
| | | | | | | | | | NSLKPEDTALYYCAAAEWGYEWPLYYAS | |
| | | | | | | | | | SWYWGQGTQVTVSS | |
| LR8 | Nb | SARS-CoV2 | | | | S; RBD | Phage Display | 773 | QVQLVESGGGSVQAGGSLRLSCAASGSI | |
| | | | | | | | Library (Nanobody, | | SSITYLGWFRQAPGKEREGVAALITDSG | |
| | | | | | | | non-immune) | | RTYYADSVKGRFTVSLDNAKNTVYLQM | |
| | | | | | | | | | NSLKPEDTALYYCAAAEWGYEWPLYYAS | |
| | | | | | | | | | SWYWGQGTQVTVSS | |
| mAb-1 | Ab | SARS-CoV1, | 229E, | | | S; Unk | B-cells; SARS-CoV1 | 774 | QVQLVESGGGSVQAGGSLRLSCAASGSI | 1841 |
| | | SARS-CoV2 | HKU1, | | | | Human Patient | | SSITYLGWFRQAPGKEREGVAALITDSG | |
| | | | NL63, | | | | | | RTYYADSVKGRFTVSLDNAKNTVYLQM | |
| | | | OC43 | | | | | | NSLKPEDTALYYCAAAEWGYEWPLYYAS | |
| | | | | | | | | | SWYWGQGTQVTVSS | |
| mAb-10 | Ab | SARS-CoV1, | 229E, | | | S; Unk | B-cells; SARS-CoV1 | 775 | QVQLVESGGGSVQAGGSLRLSCAASGSI | 1842 |
| | | SARS-CoV2 | HKU1, | | | | Human Patient | | SSITYLGWFRQAPGKEREGVAALITDSG | |
| | | | NL63, | | | | | | RTYYADSVKGRFTVSLDNAKNTVYLQM | |
| | | | OC43 | | | | | | NSLKPEDTALYYCAAAEWGYEWPLYYAS | |
| | | | | | | | | | SWYWGQGTQVTVSS | |
| mAb-100 | Ab | SARS-CoV2 | 229E, | | | S; Unk | B-cells; SARS-CoV1 | 776 | QVQLVESGGGSVQAGGSLRLSCAASGSI | 1843 |
| | | (weak) | HKU1, | | | | Human Patient | | SSITYLGWFRQAPGKEREGVAALITDSG | |
| | | | NL63, | | | | | | RTYYADSVKGRFTVSLDNAKNTVYLQM | |
| | | | OC43, | | | | | | NSLKPEDTALYYCAAAEWGYEWPLYYAS | |
| | | | SARS- | | | | | | SWYWGQGTQVTVSS | |
| | | | CoV1 | | | | | | | |
| mAb-101 | Ab | SARS-CoV2 | 229E, | | | S; Unk | B-cells; SARS-CoV1 | 777 | QVQLVESGGGSVQAGGSLRLSCAASGSI | 1844 |
| | | (weak) | HKU1, | | | | Human Patient | | SSITYLGWFRQAPGKEREGVAALITDSG | |
| | | | NL63, | | | | | | RTYYADSVKGRFTVSLDNAKNTVYLQM | |
| | | | OC43, | | | | | | NSLKPEDTALYYCAAAEWGYEWPLYYAS | |
| | | | SARS- | | | | | | SWYWGQGTQVTVSS | |
| | | | CoV1 | | | | | | | |
| mAb-102 | Ab | SARS-CoV2 | 229E, | | | S; Unk | B-cells; SARS-CoV1 | 778 | QVQLVESGGGSVQAGGSLRLSCAASGSI | 1845 |
| | | (weak) | HKU1, | | | | Human Patient | | SSITYLGWFRQAPGKEREGVAALITDSG | |
| | | | NL63, | | | | | | RTYYADSVKGRFTVSLDNAKNTVYLQM | |
| | | | OC43, | | | | | | NSLKPEDTALYYCAAAEWGYEWPLYYAS | |
| | | | SARS- | | | | | | SWYWGQGTQVTVSS | |
| | | | CoV1 | | | | | | | |
| mAb-103 | Ab | SARS-CoV2 | 229E, | | | S; Unk | B-cells; SARS-CoV1 | 779 | QVQLVESGGGSVQAGGSLRLSCAASGSI | 1846 |
| | | (weak) | HKU1, | | | | Human Patient | | SSITYLGWFRQAPGKEREGVAALITDSG | |
| | | | NL63, | | | | | | RTYYADSVKGRFTVSLDNAKNTVYLQM | |
| | | | OC43, | | | | | | NSLKPEDTALYYCAAAEWGYEWPLYYAS | |
| | | | SARS- | | | | | | SWYWGQGTQVTVSS | |
| | | | CoV1 | | | | | | | |
| mAb-104 | Ab | SARS-CoV2 | 229E, | | | S; Unk | B-cells; SARS-CoV1 | 780 | QVQLVESGGGSVQAGGSLRLSCAASGSI | 1847 |
| | | (weak) | HKU1, | | | | Human Patient | | SSITYLGWFRQAPGKEREGVAALITDSG | |
| | | | NL63, | | | | | | RTYYADSVKGRFTVSLDNAKNTVYLQM | |
| | | | OC43, | | | | | | NSLKPEDTALYYCAAAEWGYEWPLYYAS | |
| | | | SARS- | | | | | | SWYWGQGTQVTVSS | |
| | | | CoV1 | | | | | | | |
| mAb-105 | Ab | SARS-CoV2 | 229E, | | | S; Unk | B-cells; SARS-CoV1 | 781 | QVQLVESGGGSVQAGGSLRLSCAASGSI | 1848 |
| | | (weak) | HKU1, | | | | Human Patient | | SSITYLGWFRQAPGKEREGVAALITDSG | |
| | | | NL63, | | | | | | RTYYADSVKGRFTVSLDNAKNTVYLQM | |
| | | | OC43, | | | | | | NSLKPEDTALYYCAAAEWGYEWPLYYAS | |
| | | | SARS- | | | | | | SWYWGQGTQVTVSS | |
| | | | CoV1 | | | | | | | |

| | | | | | | SEQ | | SEQ | | |
|---|---|---|---|---|---|---|---|---|---|---|
| | | Heavy V | Heavy J | Light V | Light J | ID | | ID | | |
| Name | VL | Gene | Gene | Gene | Gene | NO.: | CDRH3 | NO.: | CDRL3 | Sources |
| LR16 | N/A | IGHV3-3 | IGHJ4 | N/A | N/A | 2873 | AAADWGYNI | | N/A | Tingting Li et al., 2020 |
| | | (Alpaca) | (Alpaca) | | | | PLNITDYWY | | | (https://www.biorxiv.or |
| | | | | | | | | | | g/content/10.1101/202 |
| | | | | | | | | | | 0.06.09.143438v1) |
| LR2 | N/A | IGHV3-3 | IGHJ4 | N/A | N/A | 2874 | AAAMNGYNE | | N/A | Tingting Li et al., 2020 |
| | | (Alpaca) | (Alpaca) | | | | PLYSYDYEY | | | (https://www.biorxiv.or |
| | | | | | | | | | | g/content/10.1101/202 |
| | | | | | | | | | | 0.06.09.143438v1) |
| LR3 | N/A | IGHV3-3 | IGHJ4 | N/A | N/A | 2875 | AAASWGYEW | | N/A | Tingting Li et al., 2020 |
| | | (Alpaca) | (Alpaca) | | | | PLVYDDYWY | | | (https://www.biorxiv.or |
| | | | | | | | | | | g/content/10.1101/202 |
| | | | | | | | | | | 0.06.09.143438v1) |
| LR5 | N/A | IGHV3-3 | IGHJ4 | N/A | N/A | 2876 | AAATWGYH | | N/A | Tingting Li et al., 2020 |
| | | (Alpaca) | (Alpaca) | | | | WPLGAWDY | | | (https://www.biorxiv.or |
| | | | | | | | WY | | | g/content/10.1101/202 |
| | | | | | | | | | | 0.06.09.143438v1) |
| LR6 | N/A | IGHV3-3 | IGHJ4 | N/A | N/A | 2877 | AAATWGYSW | | N/A | Tingting Li et al., 2020 |
| | | (Alpaca) | (Alpaca) | | | | PLEHDEYWY | | | (https://www.biorxiv.or |
| | | | | | | | | | | g/content/10.1101/202 |
| | | | | | | | | | | 0.06.09.143438v1) |
| LR7 | N/A | IGHV3-3 | IGHJ4 | N/A | N/A | 2878 | AAAFHGEQY | | N/A | Tingting Li et al., 2020 |
| | | (Alpaca) | (Alpaca) | | | | PLYTNKYHY | | | (https://www.biorxiv.or |
| | | | | | | | | | | g/content/10.1101/202 |
| | | | | | | | | | | 0.06.09.143438v1) |
| LR8 | N/A | IGHV3-3 | IGHJ4 | N/A | N/A | 2879 | AAANYGANF | | N/A | Tingting Li et al., 2020 |
| | | (Alpaca) | (Alpaca) | | | | PLQANTYFY | | | (https://www.biorxiv.or |
| | | | | | | | | | | g/content/10.1101/202 |
| | | | | | | | | | | 0.06.09.143438v1) |
| mAb-1 | QPVLTQPPSVSGAPGQRITISCTGSSS | IGHV3-21 | IGHJ4 | IGLV1-40 | IGLJ1 | 2880 | ARDFSGHTAV | 4070 | QSYDSSLS | Anna Wec et al., 2020 |
| | NIGAGYDVHWYQQLPGTAPKLLIYGS | (Human) | (Human) | (Human) | (Human) | | AGTGFEY | | VLYV | (https://science.science |
| | SSRPSGVPDRFSGSKSGTSASLAITGLQ | | | | | | | | | mag.org/content/early/ |
| | AEDEADYYCQSYDSSLSVLYVFGTGTK | | | | | | | | | 2020/06/15/science.abc |
| | VTVL | | | | | | | | | 7424) |
| mAb-10 | DIVLTQTPATLSVSPGEGATLSCRASQS | IGHV3-66 | IGHJ4 | IGKV3-15 | IGKJ4 | 2881 | VRASPPGGN | 4071 | QQYNSWP | Anna Wec et al., 2020 |
| | VRSNLAWFQQRPGQVPRLLIYDASTR | (Human) | (Human) | (Human) | (Human) | | TGWPFFED | | PLT | (https://science.science |
| | ATGVPARFTGSGSGTYFTLTISSLQSED | | | | | | | | | mag.org/content/early/ |
| | FAVYYCQQYNSWPPLTFGGGTKLEIK | | | | | | | | | 2020/06/15/science.abc |
| | | | | | | | | | | 7424) |
| mAb-100 | EIVMTQSPATLSVSPGETATLSCRASQ | IGHV3-30 | IGHJ4 | IGKV3-11 | IGKJ1 | 2882 | ARDNALQNA | 4072 | QRRGDGY | Anna Wec et al., 2020 |
| | SVGRFMGWYQQKPGQAPRLLIFDAS | (Human) | (Human) | (Human) | (Human) | | QIGYLDY | | N | (https://science.science |
| | NRVTGVPDRFRGSGSGTDFILTINSLEP | | | | | | | | | mag.org/content/early/ |
| | EDSASYYCQRRGDGYNFGQGTKVEIK | | | | | | | | | 2020/06/15/science.abc |
| | | | | | | | | | | 7424) |
| mAb-101 | ETTLTQSPLSLPVTLGQPASISCRSSQG | IGHV1-69 | IGHJ6 | IGKV2-30 | IGKJ1 | 2883 | VLDSDPYTAT | 4073 | MQGTEW | Anna Wec et al., 2020 |
| | LVHSDGNTYLNWFQQRPGQSPRRLIY | (Human) | (Human) | (Human) | (Human) | | FSHNHYWYA | | PRT | (https://science.science |
| | KVSNRDSGVPDRFSGSGSGTDFTLKIS | | | | | | MDV | | | mag.org/content/early/ |
| | RVEAEDIGVYYCMQGTEWPRTFGQG | | | | | | | | | 2020/06/15/science.abc |
| | TKVEIK | | | | | | | | | 7424) |
| mAb-102 | DIRVTQSPLSLPVTLGQPASISCRSSQRI | IGHV1-69 | IGHJ6 | IGKV2-30 | IGKJ3 | 2884 | ARDPSIHYTG | 4074 | MQGTEW | Anna Wec et al., 2020 |
| | VHTDGNTYLNWFLQRPGQSPRRLIYK | (Human) | (Human) | (Human) | (Human) | | NHHWYDLDI | | PRT | (https://science.science |
| | VSNRDSGVPDRFSGSGSGTDFTLKISR | | | | | | | | | mag.org/content/early/ |
| | VEAEDVGIYYCMQGTEWPRTFGQGT | | | | | | | | | 2020/06/15/science.abc |
| | KVDIK | | | | | | | | | 7424) |
| mAb-103 | EIVMTQSPSSLSASVGDRVTITCRAGH | IGHV7-4- | IGHJ4 | IGKV1-39 | IGKJ3 | 2885 | AREEHYDFSS | 4075 | QQSYSTPY | Anna Wec et al., 2020 |
| | TISTYLNWYQQKPGKAPKILISGASSLQ | 1 | (Human) | (Human) | (Human) | | GYFRPAY | | T | (https://science.science |
| | SGVPSRFSGSGSGTDFTLTIGSLQPEDF | (Human) | | | | | | | | mag.org/content/early/ |
| | ATYYCQQSYSTPYTFGQGTKVDIK | | | | | | | | | 2020/06/15/science.abc |
| | | | | | | | | | | 7424) |
| mAb-104 | QPVLTQPASVSGSPGQSSTLSCSGTSS | IGHV4-34 | IGHJ4 | IGLV2-23 | IGLJ3 | 2886 | ARGMTSPVV | 4076 | CSYAGSGT | Anna Wec et al., 2020 |
| | DVGSYDLVSWYQQHPGKAPKLMIYE | (Human) | (Human) | (Human) | (Human) | | HLYSSGRPSR | | WI | (https://science.science |
| | GTKRPSGVSDRFSGSTSGNTASLTISGL | | | | | | WFDF | | | mag.org/content/early/ |
| | QAEDEANYYCCSYAGSGTWIFGGGTK | | | | | | | | | 2020/06/15/science.abc |
| | LTVL | | | | | | | | | 7424) |
| mAb-105 | EIVLTQSPGTLSLSPGDRVTLFCRASQN | IGHV4-4 | IGHJ6 | IGKV3-20 | IGKJ1 | 2887 | ARSFISFDSS | 4077 | HQYGSSP | Anna Wec et al., 2020 |
| | IANNHLAWYQQKPGQAPRVLIYGAST | (Human) | (Human) | (Human) | (Human) | | GHPYYYYAMD | | WT | (https://science.science |
| | TATDIPDRFSGRVSGTDFTLTISRLDPE | | | | | | V | | | mag.org/content/early/ |
| | DFAVYYCHQYGSSPWTFGQGTKLEIK | | | | | | | | | 2020/06/15/science.abc |
| | | | | | | | | | | 7424) |

| | | | | | Not | | | | | |
|---|---|---|---|---|---|---|---|---|---|---|
| | Ab | | | Neutral- | Neutral- | | | SEQ | | SEQ |
| | or | | Doesn't | ising | ising | Protein + | | ID | | ID |
| Name | Nb | Binds to | Bind to | Vs | Vs | Epitope | Origin | NO.: | VH or VHH | NO.: |
| mAb-106 | Ab | SARS-CoV2 | 229E, | | | S; Unk | B-cells; SARS-CoV1 | 782 | QVQLVESGGGSVQAGGSLRLSCAASGSI | 1849 |
| | | (weak) | HKU1, | | | | Human Patient | | SSITYLGWFRQAPGKEREGVAALITDSG | |
| | | | NL63, | | | | | | RTYYADSVKGRFTVSLDNAKNTVYLQM | |
| | | | OC43, | | | | | | NSLKPEDTALYYCAAAEWGYEWPLYYAS | |
| | | | SARS- | | | | | | SWYWGQGTQVTVSS | |
| | | | CoV1 | | | | | | | |
| mAb-107 | Ab | SARS-CoV1, | 229E, | | | S; Unk | B-cells; SARS-CoV1 | 783 | QVQLVESGGGSVQAGGSLRLSCAASGSI | 1850 |
| | | SARS-CoV2 | HKU1, | | | | Human Patient | | SSITYLGWFRQAPGKEREGVAALITDSG | |
| | | (weak | NL63, | | | | | | RTYYADSVKGRFTVSLDNAKNTVYLQM | |
| | | | OC43 | | | | | | NSLKPEDTALYYCAAAEWGYEWPLYYAS | |
| | | | | | | | | | SWYWGQGTQVTVSS | |
| mAb-108 | Ab | SARS-CoV2 | 229E, | | | S; Unk | B-cells; SARS-CoV1 | 784 | QVQLVESGGGSVQAGGSLRLSCAASGSI | 1851 |
| | | (weak) | HKU1, | | | | Human Patient | | SSITYLGWFRQAPGKEREGVAALITDSG | |
| | | | NL63, | | | | | | RTYYADSVKGRFTVSLDNAKNTVYLQM | |
| | | | OC43, | | | | | | NSLKPEDTALYYCAAAEWGYEWPLYYAS | |
| | | | SARS- | | | | | | SWYWGQGTQVTVSS | |
| | | | CoV1 | | | | | | | |
| mAb-109 | Ab | SARS-CoV1, | 229E, | | | S; Unk | B-cells; SARS-CoV1 | 785 | QVQLVESGGGSVQAGGSLRLSCAASGSI | 1852 |
| | | SARS-CoV2 | HKU1, | | | | Human Patient | | SSITYLGWFRQAPGKEREGVAALITDSG | |
| | | (weak) | NL63, | | | | | | RTYYADSVKGRFTVSLDNAKNTVYLQM | |
| | | | OC43 | | | | | | NSLKPEDTALYYCAAAEWGYEWPLYYAS | |
| | | | | | | | | | SWYWGQGTQVTVSS | |
| mAb-11 | Ab | SARS-CoV1, | 229E, | | | S; Unk | B-cells; SARS-CoV1 | 786 | QVQLVESGGGSVQAGGSLRLSCAASGSI | 1853 |
| | | SARS-CoV2 | HKU1, | | | | Human Patient | | SSITYLGWFRQAPGKEREGVAALITDSG | |
| | | | NL63, | | | | | | RTYYADSVKGRFTVSLDNAKNTVYLQM | |
| | | | OC43 | | | | | | NSLKPEDTALYYCAAAEWGYEWPLYYAS | |
| | | | | | | | | | SWYWGQGTQVTVSS | |
| mAb-110 | Ab | SARS-CoV1, | 229E, | | | S; Unk | B-cells; SARS-CoV1 | 787 | EVQLVESGGGVVQPGRSLRLSCAASGFT | 1854 |
| | | SARS-CoV2 | HKU1, | | | | Human Patient | | FSSYGMHWVRQAPGKGLEWVAVIWY | |
| | | (weak) | NL63, | | | | | | DGSNKYYADSVKGRFTISRDNSKNTLYL | |
| | | | OC43 | | | | | | QMNSLRAEDTAVYYCARVGSGRVYWG | |
| | | | | | | | | | QGTLVTVSS | |
| mAb-111 | Ab | 229E | HKU1, | | | S; Unk | B-cells; SARS-CoV1 | 788 | QVQLVESGPGLVRPSGTLSVTCAVSGDS | 1855 |
| | | (weak), | NL63, | | | | Human Patient | | ISSDYWCTWVRQSPGKGLEWIGKISHS | |
| | | SARS-CoV1, | OC43 | | | | | | GSLNYNPSLKSRVTMSVDKSKNHFSLKL | |
| | | SARS-CoV2 | | | | | | | ASVTAADTAVYYCARVRIGASHHNFWS | |
| | | (weak) | | | | | | | GYYTDAFDIWGQGTTVTVSS | |
| mAb-112 | Ab | 229E | OC43 | | | S; Unk | B-cells; SARS-Cov1 | 789 | QVQLVQSGAEVKKPGESLKISCKASGYS | 1856 |
| | | (weak), | | | | | Human Patient | | FTNYWVGWVRQMPAKGLEWMGIIWP | |
| | | HKU1 | | | | | | | DDSDTRYRPSFQGQVTISVDKSISTAYLH | |
| | | (weak), | | | | | | | WNSLKASDNGMYFCARAPLASCSGGRC | |
| | | NL63, SARS- | | | | | | | PTYNRFDLWGQGTLVTVSS | |
| | | CoV1, SARS- | | | | | | | | |
| | | CoV2 | | | | | | | | |
| | | (weak) | | | | | | | | |
| mAb-113 | Ab | 229E, HKU1 | OC43 | | | S; Unk | B-cells; SARS-CoV1 | 790 | QVQLVQSGAEVKKPGSSMKVSCKASGV | 1857 |
| | | (weak) | | | | | Human Patient | | NFRSYSFSWVRQAPGQGLEWMGGVIP | |
| | | NL63, SARS- | | | | | | | YFPTANYADKFRDRVTITADESTGTVYLD | |
| | | CoV1, SARS- | | | | | | | MSSLRSEDTAVYFCASEYFDGRSYHSFC | |
| | | CoV2 | | | | | | | GLDVWGQGTTVTVSS | |
| | | (weak) | | | | | | | | |
| mAb-114 | Ab | 229E, HKU1, | OC43 | | | S; Unk | B-cells; SARS-CoV1 | 791 | QVQLVESGGGLVQPGGSLRLSCAASGF | 1858 |
| | | NL63, SARS- | | | | | Human Patient | | TFSNYAMTWVRQAPGKGLKWVSGINP | |
| | | CoV1, SARS- | | | | | | | SGDATFYTDSVKGQFTISRDNSKNILYLQ | |
| | | CoV2 | | | | | | | MNRLRADDTAIYYCAKGLSFYGSGSDAF | |
| | | (weak) | | | | | | | DVWGQGTTVTVSS | |
| mAb-115 | Ab | 229E, HKU1 | OC43 | | | S; Unk | B-cells; SARS-CoV1 | 792 | QVQLVQSGAEVKKPGASVKVSCKASGY | 1859 |
| | | (weak), | | | | | Human Patient | | TFTDYYVHWVRQVPGQGLEWMGWIS | |
| | | NL63, SARS- | | | | | | | PDSGDTIRAQNFQGRVTMTRDTSMINT | |
| | | CoV1, SARS- | | | | | | | AYMEVNRLRTDDTAIYYCARDLISVIRGL | |
| | | CoV2 | | | | | | | GGGMDVWGQGTTVTVSS | |
| | | (weak) | | | | | | | | |
| mAb-116 | Ab | 229E | OC43 | | | S; Unk | B-cells; SARS-CoV1 | 793 | QVQLVQSGAEVKKPGASVKVSCKTSGY | 1860 |
| | | (weak), | | | | | Human Patient | | TFTGHYIHWVRQAPGQGLEWMGWIN | |
| | | HKU1 | | | | | | | PASGDTNYAQKFQGRVTKTRDTSITTAY | |
| | | (weak), | | | | | | | MELNRLRSDDTAVYYCARGGPLPWSDL | |
| | | NL63 | | | | | | | DIVGTFDYWGQGTLVTVSS | |
| | | (weak), | | | | | | | | |
| | | SARS-CoV1, | | | | | | | | |
| | | SARS-CoV2 | | | | | | | | |
| | | (weak) | | | | | | | | |

| | | | | | | SEQ | | SEQ | | |
|---|---|---|---|---|---|---|---|---|---|---|
| | | Heavy V | Heavy J | Light V | Light J | ID | | ID | | |
| Name | VL | Gene | Gene | Gene | Gene | NO.: | CDRH3 | NO.: | CDRL3 | Sources |
| mAb-106 | ETTLTQSPATLSVSPGETATLSCRASQS | IGHV3-30 | IGHJ4 | IGKV3-11 | IGKJ1 | 2888 | ARDNALQNA | 4078 | QRRGDGY | Anna Wec et al., 2020 |
| | VGRFMGWYQQKPGQAPRLLIFDASN | (Human) | (Human) | (Human) | (Human) | | QIGYLDY | | N | (https://science.science |
| | RVTGVPDRFRGSGSGTDFILTINSLEPE | | | | | | | | | mag.org/content/early/ |
| | DSASYYCQRRGDGYNFGQGTKVEIK | | | | | | | | | 2020/06/15/science.abc |
| | | | | | | | | | | 7424) |
| mAb-107 | DIRMTQSPLSLPVDLGQSASISCRSSQ | IGHV1-69 | IGHJ6 | IGKV2-30 | IGKJ2 | 2889 | ARDPSILNTG | 4079 | MQATDW | Anna Wec et al., 2020 |
| | RVVHTNGNTYLHWFHQRPGQAPRRL | (Human) | (Human) | (Human) | (Human) | | NHHWYDLD | | PRT | (https://science.science |
| | IYKVSNRESGVPDRFSGSGSGTDFTLRI | | | | | | M | | | mag.org/content/early/ |
| | SRVEAEDVGVYYCMQATDWPRTFGQ | | | | | | | | | 2020/06/15/science.abc |
| | GTKLEIK | | | | | | | | | 7424) |
| mAb-108 | DIVMTQSPLSLSVTLGQAASISCTCSQT | IGHV1-69 | IGHJ6 | IGKV2-30 | IGKJ1 | 2890 | ARDPTFLNSG | 4080 | MQTTDWP | Anna Wec et al., 2020 |
| | AVHSDGNTYLNWFHQRPGQSPRRLIY | (Human) | (Human) | (Human) | (Human) | | NHFWYDVDI | | RT | (https://science.science |
| | KVSNRDSGVPDRFSGSGSGTDFTLKIN | | | | | | | | | mag.org/content/early/ |
| | RVEAEDVGIYYCMQTTDWPRTFGQG | | | | | | | | | 2020/06/15/science.abc |
| | TKVEIK | | | | | | | | | 7424) |
| mAb-109 | ETTLTQSPVTLPVTLGQPASISCTSSRW | IGHV1-69 | IGHJ4 | IGKV2-30 | IGKJ2 | 2891 | ARDASFPNTG | 4081 | MQGTEW | Anna Wec et al., 2020 |
| | LVHTNGNTYLNWFHQRPGQSPRRLIY | (Human) | (Human) | (Human) | (Human) | | NHFWYDFDL | | PRT | (https://science.science |
| | QVSNRDSGVPDRFSGSGSGTDFTLQIS | | | | | | | | | mag.org/content/early/ |
| | RVEAEDVGVYYCMQGTEWPRTFGQ | | | | | | | | | 2020/06/15/science.abc |
| | GTKLEIK | | | | | | | | | 7424) |
| mAb-11 | EIVLTQSPSSLSASVGDRVTITCQASQD | IGHV3-30 | IGHJ4 | IGKV1-33 | IGKJ5 | 2892 | AKKGSPYCGV | 4082 | QQFEDLP | Anna Wec et al., 2020 |
| | IRKCLNWYQHIPGKAPKLLIHDASSLES | (Human) | (Human) | (Human) | (Human) | | DCYKGYFDY | | IT | (https://science.science |
| | GVPSRFSGSGSGTDFSFTINSLHPEDIA | | | | | | | | | mag.org/content/early/ |
| | TYYCQQFEDLPITFGQGTRLEIK | | | | | | | | | 2020/06/15/science.abc |
| | | | | | | | | | | 7424) |
| mAb-110 | DIVMTQSPDSLAVSLGERATINCKSSQ | IGHV3-33 | IGHJ4 | IGKV4-1 | IGKJ1 | 2893 | ARVGSGRVY | 4083 | QQYYSTP | Anna Wec et al., 2020 |
| | SVLYSSNNKNYLAWYQQKPGQPPKLLI | (Human) | (Human) | (Human) | (Human) | | | | YT | (https://science.science |
| | YWASTRESGVPDRFSGSGSGTDFTLTI | | | | | | | | | mag.org/content/early/ |
| | SSLQAEDVAVYYCQQYYSTPYTFGQGT | | | | | | | | | 2020/06/15/science.abc |
| | KVEIK | | | | | | | | | 7424) |
| mAb-111 | DIVVTQSPGTLSLSPGERAALSCRASQS | (Human) | IGHJ3 | IGKV3-20 | IGKJ1 | 2894 | ARVRIGASHH | 4084 | QQYGTSP | Anna Wec et al., 2020 |
| | VGNNYLAWYQQKPGQAPRLLIYGATS | IGHV4-4 | (Human) | (Human) | (Human) | | NFWSGYYTD | | VYT | (https://science.science |
| | RATGIPDRFSGSGSGTDFTLTISRLEPE | | | | | | AFDI | | | mag.org/content/early/ |
| | DFAVYYCQQYGTSPVYTFGQGTKVEIK | | | | | | | | | 2020/06/15/science.abc |
| | | | | | | | | | | 7424) |
| mAb-112 | QPVLTQPPSVSAAPGQKVTISCSGSSS | IGHV5-51 | IGHJ4 | IGLV1-51 | IGLJ3 | 2895 | ARAPLASCSG | 4085 | GTWDFSL | Anna Wec et al., 2020 |
| | NIENNYVSWYQQLPGAAPKLLIYDNN | (Human) | (Human) | (Human) | (Human) | | GRCPTYNRFD | | SAGV | (https://science.science |
| | KRPSGIPDRFSGSKSGTSATLGITGLQT | | | | | | L | | | mag.org/content/early/ |
| | GDEADYYCGTWDFSLSAGVFGGGTKL | | | | | | | | | 2020/06/15/science.abc |
| | TVL | | | | | | | | | 7424) |
| mAb-113 | ETTLTQSPLSLPVTLGQPASISCRSSQG | IGHV1-69 | IGHJ6 | IGKV2-30 | IGKJ1 | 2896 | ASEYFDGRSY | 4086 | MQGTEW | Anna Wec et al., 2020 |
| | LVHTNGNLYLNWFHQRPGQSPRRLIY | (Human) | (Human) | (Human) | (Human) | | HSFCGLDV | | PRT | (https://science.science |
| | QVSNRDSGVPDRFSGSGSGTDFTLRIS | | | | | | | | | mag.org/content/early/ |
| | RVEAEDVGIYYCMQGTEWPRTFGQG | | | | | | | | | 2020/06/15/science.abc |
| | TKVEIK | | | | | | | | | 7424) |
| mAb-114 | DIQLTQSPSTLSASVGDSVTITCRASQSI | IGHV3-23 | IGHJ6 | IGKV1-5 | IGKJ4 | 2897 | AKGLSFYGSG | 4087 | QQYKSPL | Anna Wec et al., 2020 |
| | SSWLAWYQQKPGKAPKLLIYKASSLET | (Human) | (Human) | (Human) | (Human) | | SDAFDV | | S | (https://science.science |
| | GVPSRFSGSGSGTEFTLTISSLQPDDFA | | | | | | | | | mag.org/content/early/ |
| | TYYCQQYKSPLSFGGGTKVEIK | | | | | | | | | 2020/06/15/science.abc |
| | | | | | | | | | | 7424) |
| mAb-115 | DIQVTQSPATLSLSPGERATLSCRASQS | IGHV1-2 | IGHJ6 | IGKV3-11 | IGKJ5 | 2898 | ARDLISVIR | 4088 | QQRSDWH | Anna Wec et al., 2020 |
| | VSSYLAWYQQKPGQAPRLLIYDASKR | (Human) | (Human) | (Human) | (Human) | | GLGGGMDV | | PIT | (https://science.science |
| | ATGIPARFSGSGSGTDFTLTISSLEPEDF | | | | | | | | | mag.org/content/early/ |
| | AVYYCQQRSDWHPITFGQGTRLEIK | | | | | | | | | 2020/06/15/science.abc |
| | | | | | | | | | | 7424) |
| mAb-116 | DIQVTQSPSSLSASVGDRVTITCRASQS | IGHV1-2 | IGHJ4 | IGKV1-39 | IGKJ3 | 2899 | ARGGPLPWS | 4089 | QQSYSTP | Anna Wec et al., 2020 |
| | ISSSLNWYQQKPGKAPTLLIYTASNLQS | (Human) | (Human) | (Human) | (Human) | | DLDIVGTFDY | | G | (https://science.science |
| | GVPSRFSGSGSGTDFTLTITSLQPEDFA | | | | | | | | | mag.org/content/early/ |
| | TYYCQQSYSTPGFGPGTKVDIK | | | | | | | | | 2020/06/15/science.abc |
| | | | | | | | | | | 7424) |

| | | | | | Not | | | | | |
|---|---|---|---|---|---|---|---|---|---|---|
| | Ab | | | Neutral- | Neutral- | | | SEQ | | SEQ |
| | or | | Doesn't | ising | ising | Protein + | | ID | | ID |
| Name | Nb | Binds to | Bind to | Vs | Vs | Epitope | Origin | NO.: | VH or VHH | NO.: |
| mAb-117 | Ab | 229E, HKU1 | OC43 | | | S; Unk | B-cells; SARS-CoV1 | 794 | EVQLVESGGGVVQPGKSLRLSCVPSGFS | 1861 |
| | | NL63, SARS- | | | | | Human Patient | | FGTYGMHWVRQAPGKGPEWLAVMW | |
| | | CoV1, SARS- | | | | | | | YDGITQYYADSVKGRFTISRDNSKETLYL | |
| | | CoV2 | | | | | | | QMNSLTADDTGIYYCVKDQSSGDRLLYL | |
| | | (weak) | | | | | | | GYFDLWGPGALVTVSS | |
| mAb-118 | Ab | 229E, HKU1 | OC43 | | | S; Unk | B-cells; SARS-CoV1 | 795 | QVQLVQSGGGVVQPGKSLRLSCVASGF | 1862 |
| | | (weak), | | | | | Human Patient | | SFGTYGMHWVRQAPGKGPEWLAVM | |
| | | NL63 | | | | | | | WYDGITQYYADSVKGRFTISRDNSKETLY | |
| | | (weak), | | | | | | | LQMNSLTADDTGVYYCVKDQSSGDRLL | |
| | | SARS-CoV1, | | | | | | | YLGYFDLWGPGTLVTVSS | |
| | | SARS-CoV2 | | | | | | | | |
| | | (weak) | | | | | | | | |
| mAb-119 | Ab | 229E, HKU1 | OC43 | | | S; Unk | B-cells; SARS-CoV1 | 796 | QVQLQESGPGLVKPSGTLSLTCAVSGAS | 1863 |
| | | (weak), | | | | | Human Patient | | VSSDHWWSWVRQSPGKGLEWIGEVY | |
| | | NL63 | | | | | | | HSGSTNYNPSLKSRVTISLDQSNNQFSLK | |
| | | (weak), | | | | | | | LTSVTAADTAIYYCATMWGGLCTASNCY | |
| | | SARS-CoV1, | | | | | | | GNPMDVWGQGTTVTVSS | |
| | | SARS-CoV2 | | | | | | | | |
| | | (weak) | | | | | | | | |
| mAb-12 | Ab | SARS-CoV1, | 229E, | | | S; Unk | B-cells; SARS-CoV1 | 797 | QVQLVQSGAEVRKPGSSVKLSCKASGG | 1864 |
| | | SARS-CoV2 | HKU1, | | | | Human Patient | | TFSTHAISWVRQAPGQRPEWMGGIMP | |
| | | | NL63, | | | | | | IFGESKDTQKFQGRVTFTADESTTTAYM | |
| | | | OC43 | | | | | | ELRSLRSDDTAIYYCVRDSDPYTATVTSN | |
| | | | | | | | | | HYWYAMDVWGQGTTVTVSS | |
| mAb-120 | Ab | 229E | OC43 | | | S; Unk | B-cells; SARS-CoV1 | 798 | QVQLQQWGAGVLKPSETLSLTCAVYGG | 1865 |
| | | (weak), | | | | | Human Patient | | SFRGFFWSWIRQPPGKGLEWIGQITHS | |
| | | HKU1 | | | | | | | GSTNYNSSLKSRLTISVDTSKNQFSLNLSS | |
| | | (weak), | | | | | | | VTAADTAIYYCARGQGGYDLRRVGYGLT | |
| | | NL63 | | | | | | | SWFDPWGQGILVTVSS | |
| | | (weak), | | | | | | | | |
| | | SARS-CoV1, | | | | | | | | |
| | | SARS-CoV2 | | | | | | | | |
| | | (weak) | | | | | | | | |
| mAb-121 | Ab | 229E, HKU1 | OC43 | | | S; Unk | B-cells; SARS-CoV1 | 799 | QVQLVQSGAEVKKPGASVKVSCKASGY | 1866 |
| | | (weak), | | | | | Human Patient | | TFTSYYIHWVRQAPGQGLEWLGVIHPS | |
| | | NL63 | | | | | | | GGSTTFAQKFQGRVTMTRDTSTSTVYM | |
| | | (weak), | | | | | | | ELGSLRSDDTAVYYCARVLAGSSHEWQL | |
| | | SARS-CoV1, | | | | | | | THDAFDIWGQGTTVTVSS | |
| | | SARS-CoV2 | | | | | | | | |
| | | (weak) | | | | | | | | |
| mAb-122 | Ab | 229E | OC43 | | | S; Unk | B-cells; SARS-CoV1 | 800 | EVQLVESGAEVKKPGASVILSCKASGYTV | 1867 |
| | | (weak), | | | | | Human Patient | | TNYYIHWVRQAPGQGLEWMGWIDPD | |
| | | HKU1 | | | | | | | SGVTNFAEKFQGRVTMTRDTSISTAYME | |
| | | (weak), | | | | | | | LRWLESDDTAVYYCAKDLITVIRGLGGG | |
| | | NL63 | | | | | | | MDVWGQGTTVTVSS | |
| | | (weak), | | | | | | | | |
| | | SARS-CoV1, | | | | | | | | |
| | | SARS-CoV2 | | | | | | | | |
| | | (weak) | | | | | | | | |
| mAb-123 | Ab | 229E | NL63, | | | S; Unk | B-cells; SARS-CoV1 | 801 | EVQLLESGAEVKKPGSSVKVSCKASGGT | 1868 |
| | | (weak), | OC43 | | | | Human Patient | | FSSDAISWVRQAPGQGLEWMGGIIPIF | |
| | | HKU1 | | | | | | | GTTNYAQKFQGRVTITADESTNTAYMEL | |
| | | (weak), | | | | | | | SSLRSEDTAVYYCARDGPYDSGGYHLNH | |
| | | SARS-CoV1, | | | | | | | WGQGTLVTVSS | |
| | | SARS-CoV2 | | | | | | | | |
| | | (weak) | | | | | | | | |
| mAb-124 | Ab | HKU1 | 229E, | | | S; Unk | B-cells; SARS-CoV1 | 802 | EVQLLESGGGVVNPGGSMRLSCAGSGF | 1869 |
| | | (weak), | NL63, | | | | Human Patient | | TFSDHYMGWIRQAPGKGLEVISYISSSG | |
| | | SARS-CoV1, | OC43 | | | | | | SFIRDADSVKGRFTISRDNAKNSVYLQM | |
| | | SARS-CoV2 | | | | | | | NSLRAEDTAVYYCARMGPYGSGTFDYW | |
| | | (weak) | | | | | | | GQGTLVTVSS | |

| | | | | | | SEQ | | SEQ | | |
|---|---|---|---|---|---|---|---|---|---|---|
| | | Heavy V | Heavy J | Light V | Light J | ID | | ID | | |
| Name | VL | Gene | Gene | Gene | Gene | NO.: | CDRH3 | NO.: | CDRL3 | Sources |
| mAb-117 | EIVMTQSPATLSLSPGERATLSCRASQS | IGHV3-33 | IGHJ2 | IGKV3-11 | IGKJ3 | 2900 | VKDQSSGDRL | 4090 | QQRAKWP | Anna Wec et al., 2020 |
| | VSIYLAWYQQKPGQAPRLLIYDASNRA | (Human) | (Human) | (Human) | (Human) | | LYLGYFDL | | PRVT | (https://science.science |
| | TGVPARFSGSGSGTDFTLTINNLEPED | | | | | | | | | mag.org/content/early/ |
| | FAIYYCQQRAKWPPRVTFGPGTKVDIK | | | | | | | | | 2020/06/15/science.abc |
| | | | | | | | | | | 7424) |
| mAb-118 | DIVLTQSPATLSLSPGERATLSCRASQS | IGHV3-33 | IGHJ2 | IGKV3-11 | IGKJ3 | 2901 | VKDQSSGDRL | 4091 | QQRAKWP | Anna Wec et al., 2020 |
| | VSIYLAWYQQKPGQAPRLLIYDASNRA | (Human) | (Human) | (Human) | (Human) | | LYLGYFDL | | PRVI | (https://science.science |
| | TGIPARFSGSGSGTDFTLTINNLEPEDF | | | | | | | | | mag.org/content/early/ |
| | AIYYCQQRAKWPPRVIFGPGTKVEIK | | | | | | | | | 2020/06/15/science.abc |
| | | | | | | | | | | 7424) |
| mAb-119 | SYELTQPPSVSVSPGQTARITCSGDALP | IGHV4-4 | IGHJ6 | IGLV3-10 | IGLJ3 | 2902 | ATMWGGLCT | 4092 | YSTDSTAN | Anna Wec et al., 2020 |
| | RRYAYWYQQRSGQAPVLVIYEDNKRP | (Human) | (Human) | (Human) | (Human) | | ASNCYGNPM | | YKV | (https://science.science |
| | SGIPERFSAFSSGTMATLTISGAQVEDE | | | | | | DV | | | mag.org/content/early/ |
| | ADYYCYSTDSTANYKVFGGGTKLTVL | | | | | | | | | 2020/06/15/science.abc |
| | | | | | | | | | | 7424 |
| mAb-12 | ETTLTQSPLSLPVTLGQPASISCRSSQG | IGHV1-69 | IGHJ6 | IGKV2-30 | IGKJ3 | 2903 | VRDSDPYTAT | 4093 | MQGTEW | Anna Wec et al., 2020 |
| | LVHSNGNTYVNWFHQRPGQSPRRLIY | (Human) | (Human) | (Human) | (Human) | | VTSNHYWYA | | PRT | (https://science.science |
| | EVSNRDSGVPDRFSGSGSGTDFTLKIS | | | | | | MDV | | | mag.org/content/early/ |
| | RVEAEDIGVYYCMQGTEWPRTFGQG | | | | | | | | | 2020/06/15/science.abc |
| | TKVDIK | | | | | | | | | 7424) |
| mAb-120 | QSVLIQPASVSGSPGQSITISCTGSSSD | IGHV4-34 | IGHJ5 | IGLV2-23 | IGLJ3 | 2904 | ARGQGGYDL | 4094 | CSYAGSSA | Anna Wec et al., 2020 |
| | VGSYNLVSWYQQHPGKAPKLMIYEGY | (Human) | (Human) | (Human) | (Human) | | RRVGYGLTS | | VVVV | (https://science.science |
| | KRPSGVSNRFSGSKSGNTASLTISGLQ | | | | | | WFDP | | | mag.org/content/early/ |
| | AEDEADYYCCSYAGSSAVVVVFGGGT | | | | | | | | | 2020/06/15/science.abc |
| | KLTVL | | | | | | | | | 7424) |
| mAb-121 | DIRVTQSPDSLAVSLGERATINCRTSQS | IGHV1-46 | IGHJ3 | IGKV4-1 | IGKJ3 | 2905 | ARVLAGSSHE | 4095 | QQYYSTPY | Anna Wec et al., 2020 |
| | VLYSSNNKNYLGWYQQKPGQPPKLLI | (Human) | (Human) | (Human) | (Human) | | WQLTHDAFD | | T | (https://science.science |
| | YWASTRESGVPDRFSGSGSGTDFTLTI | | | | | | | | | mag.org/content/early/ |
| | SSLQAEDVAVYYCQQYYSTPYTFGQGT | | | | | | | | | 2020/06/15/science.abc |
| | KVDIK | | | | | | | | | 7424) |
| mAb-122 | EIVLTQSPATLSLSPGERATLSCRASQS | IGHV1-2 | IGHJ6 | IGKV3-11 | IGKJ5 | 2906 | AKDLITVIRGL | 4096 | LQRSDWH | Anna Wec et al., 2020 |
| | VSTYLAWYQQKPGQAPRLLIYDASNR | (Human) | (Human) | (Human) | (Human) | | GGGMDV | | PIT | (https://science.science |
| | ATGIPARFSGSGSGTDFTLTISSLEPEDF | | | | | | | | | mag.org/content/early/ |
| | ALYYCLQRSDWHPITFGQGTRLEIK | | | | | | | | | 2020/06/15/science.abc |
| | | | | | | | | | | 7424) |
| mAb-123 | DIQLTQSPATLSLSPGERATLSCRANQS | IGHV1-69 | IGHJ1 | IGKV3-11 | IGKJ4 | 2907 | ARDGPYDSG | 4097 | QQRSNWP | Anna Wec et al., 2020 |
| | VSNFLAWYQQKPGQAPRHLIYDASNR | (Human) | (Human) | (Human) | (Human) | | GYHLNH | | PRLT | (https://science.science |
| | ATGIPARFSGSGSGTDFTLTISSLEPEDF | | | | | | | | | mag.org/content/early/ |
| | AVYYCQQRSNWPPRLTFGGGTKVEIK | | | | | | | | | 2020/06/15/science.abc |
| | | | | | | | | | | 7424) |
| mAb-124 | DIVMTQTPGTLSVSPGERATLSCRASQ | IGHV3-11 | IGHJ4 | IGKV3-20 | IGKJ3 | 2908 | ARMGPYGSG | 4098 | LQYSLATT | Anna Wec et al., 2020 |
| | IINRSQLGWYQHKPGQPPRLLIFDSSK | (Human) | (Human) | (Human) | (Human) | | TFDY | | | (https://science.science |
| | RATGTPDRFSASGSETDFTLTISGVEPE | | | | | | | | | mag.org/content/early/ |
| | DSGVYYCLQYSLATTFGPGTKVEIK | | | | | | | | | 2020/06/15/science.abc |
| | | | | | | | | | | 7424) |

| | | | | | Not | | | | | |
|---|---|---|---|---|---|---|---|---|---|---|
| | Ab | | | Neutral- | Neutral- | | | SEQ | | SEQ |
| | or | | Doesn't | ising | ising | Protein + | | ID | | ID |
| Name | Nb | Binds to | Bind to | Vs | Vs | Epitope | Origin | NO.: | VH or VHH | NO.: |
| mAb-125 | Ab | (weak) | OC43 | | | S; Unk | B-cells; SARS-CoV1 | 803 | EVQLVESGAEVRKPGSSVKVSCKATGGT | 1870 |
| | | 229E, HKU1 | | | | | Human Patient | | FSSYGITWVRQAPGQGLEWMGRIIPTL | |
| | | (weak), | | | | | | | GRTNYAQKFQGRVTITADKSTSTAHMEL | |
| | | NL63 | | | | | | | SSLRSEDTAVYYCARDLSTLQPDAIVNFD | |
| | | (weak), | | | | | | | YWGQGTLVTVSS | |
| | | SARS-CoV1, | | | | | | | | |
| | | SARS-CoV2 | | | | | | | | |
| mAb-126 | Ab | HKU1 | 229E, | | | S; Unk | B-cells; SARS-CoV1 | 804 | QVQLVQSGAEVKKPGSSVKVSCKTSGG | 1871 |
| | | (weak), | NL63, | | | | Human Patient | | SFTSYVLSWVRQAPGQGLEWMGRIVP | |
| | | SARS-CoV1, | OC43 | | | | | | NLGVANYAQKFQDRVTITADKSTTTAYL | |
| | | SARS-CoV2 | | | | | | | ELRSLRSEDTAVYYCARDLYYDNGGYNY | |
| | | (weak) | | | | | | | LDYWGPGTLVTVSS | |
| mAb-127 | Ab | 229E | NL63, | | | S; Unk | B-cells; SARS-CoV1 | 805 | QVQLVESGGGLVQPGGSLRLSCAASGF | 1872 |
| | | (weak), | OC43 | | | | Human Patient | | TFSNYNMVWVRQAPGKGLEWISYISSSS | |
| | | HKU1 | | | | | | | STIYYADSVKGRFIISRDNAKNSLHLQMN | |
| | | (weak), | | | | | | | SLRDEDTAVYYCVRDYCNSVSCYTYYYIG | |
| | | SARS-CoV1, | | | | | | | MDVWGQGTTVTVSS | |
| | | SARS-CoV2 | | | | | | | | |
| | | (weak) | | | | | | | | |
| mAb-128 | Ab | 229E | OC43 | | | S; Unk | B-cells; SARS-CoV1 | 806 | EVQLVQSGAEVKKPGASVKVSCKASGYS | 1873 |
| | | (weak), | | | | | Human Patient | | STNYGFSWVRQAPGQGLEWMGWISV | |
| | | HKU1, NL63 | | | | | | | HSGNANFAQKFQGRITMTTDTSTTTAY | |
| | | (weak), | | | | | | | MELRNLRSDDTATYYCATSASSYSRYYFG | |
| | | SARS-CoV1, | | | | | | | LDVWGQGTTVTVSS | |
| | | SARS-CoV2 | | | | | | | | |
| | | (weak) | | | | | | | | |
| mAb-129 | Ab | HKU1, SARS- | 229E, | | | S; Unk | B-cells; SARS-CoV1 | 807 | EVQLLESGPGLVKPSQTLSLTCTVSNGFI | 1874 |
| | | CoV1 | NL63, | | | | Human Patient | | SSGEYYWSWIRQSPGKGLEWIGYISHSG | |
| | | (weak), | OC43 | | | | | | STYYNRSLKSRVTISLDTSRNQFSLNLSSV | |
| | | SARS-CoV2 | | | | | | | TAADTAVYYCARDLAKWSYGYYYSGMD | |
| | | (weak) | | | | | | | VWGQGTTVTVSS | |
| mAb-13 | Ab | SARS-CoV1, | 229E, | | | S; Unk | B-cells; SARS-CoV1 | 808 | QVQLVQSGAEVKKPGSSVKVSCKISGGT | 1875 |
| | | SARS-CoV2 | HKU1, | | | | Human Patient | | FKNSAFSWARQVPGQGFQWMGGIIP | |
| | | | NL63, | | | | | | MFGVPHSVQMFQGRVTLTADESTSAVY | |
| | | | OC43 | | | | | | MELSGLTSDDTAVYYCAREEYSGTVHNF | |
| | | | | | | | | | FGMDVWGQGTTVTVSS | |
| mAb-130 | Ab | HKU1 | 229E, | | | S; Unk | B-cells; SARS-CoV1 | 809 | EVQLVESGGGLVQPGRSLRLSCAASGFT | 1876 |
| | | (weak), | OC43 | | | | Human Patient | | FDDYAMHWVRQVPGRGLEWVSGISW | |
| | | NL63 | | | | | | | NSGTINYADSVMGRFTISRDNAKNSLYL | |
| | | (weak), | | | | | | | QMNSLRAEDTALYYCAKDGRYCSGISCR | |
| | | SARS-CoV1 | | | | | | | TGMDVWGQGTTVTVSS | |
| | | (weak), | | | | | | | | |
| | | SARS-CoV2 | | | | | | | | |
| | | (weak) | | | | | | | | |
| mAb-131 | Ab | 229E | NL63, | | | S; Unk | B-cells; SARS-CoV1 | 810 | EVQLVESGGGLVQPGESLRLSCAASGEN | 1877 |
| | | (weak), | OC43 | | | | Human Patient | | FSPYGMNWVRQAPGKGLEWIAYIISGS | |
| | | HKU1 | | | | | | | GTIYYADSVKGRFTISRDNAQSSLYLQM | |
| | | (weak), | | | | | | | NSLRAEDTAVYYCARGLLDYLHDAFDIW | |
| | | SARS-CoV1 | | | | | | | GQGTMVTVSS | |
| | | (weak), | | | | | | | | |
| | | SARS-CoV2 | | | | | | | | |
| | | (weak) | | | | | | | | |
| mAb-132 | Ab | 229E, HKU1 | OC43 | | | S; Unk | B-cells; SARS-CoV1 | 811 | EVQLQESGPGLVKPSETLSLTCAVSGGS | 1878 |
| | | (weak), | | | | | Human Patient | | VSSDTDYWGWIRQPPGKGLEWIGSIHD | |
| | | NL63 | | | | | | | SERTYYDPSLKSRVTISVDTSKNQFSLRLS | |
| | | (weak), | | | | | | | SVTAADTALYFCASRHLDLLPIGSFDVW | |
| | | SARS-CoV1 | | | | | | | GRGTMVTVSS | |
| | | (weak), | | | | | | | | |
| | | SARS-CoV2 | | | | | | | | |
| | | (weak) | | | | | | | | |
| mAb-133 | Ab | HKU1 | 229E, | | | S; Unk | B-cells; SARS-CoV1 | 812 | QVQLLESGGGLVQPGRSLRLSCTASGFR | 1879 |
| | | (weak), | NL63, | | | | Human Patient | | FGDYTMTWFRQAPGKGLEWVGFIRSIA | |
| | | SARS-CoV1 | OC43 | | | | | | YGGTTEHAASVEGRFIISRDDSKSIAYLQ | |
| | | (weak), | | | | | | | MNSLKAEDTGVYFCTRGSGMFYGSSSG | |
| | | SARS-CoV2 | | | | | | | MDVWGQGTTVTVSS | |
| | | (weak) | | | | | | | | |

| | | | | | | SEQ | | SEQ | | |
|---|---|---|---|---|---|---|---|---|---|---|
| | | Heavy V | Heavy J | Light V | Light J | ID | | ID | | |
| Name | VL | Gene | Gene | Gene | Gene | NO.: | CDRH3 | NO.: | CDRL3 | Sources |
| mAb-125 | QPVLTQSSSASASLGSSVKLTCTLSSGH | IGHV1-69 | IGHJ4 | IGLV4-60 | IGLJ6 | 2909 | ARDLSTLQPD | 4099 | ETWDSNL | Anna Wec et al., 2020 |
| | SSYILAWHQQQPGKAPRFLMKFEVG | (Human) | (Human) | (Human) | (Human) | | AIVNFDY | | KGV | (https://science.science |
| | GRYNKGSGVPDRFSGSSSGADRYLTIS | | | | | | | | | mag.org/content/early/ |
| | NLQSEDEADYYCETWDSNLKGVFGG | | | | | | | | | 2020/06/15/science.abc |
| | GTKVTVL | | | | | | | | | 7424) |
| mAb-126 | QPVLTQSSSASASLGSSVKLTCTLRSGH | IGHV1-69 | IGHJ4 | IGLV4-60 | IGLJ6 | 2910 | ARDLYYDNG | 4100 | EAWDNNN | Anna Wec et al., 2020 |
| | SSYIIAWHQQQPGKAPRFLMKVGHSG | (Human) | (Human) | (Human) | (Human) | | GYNYLDY | | LGV | (https://science.science |
| | SYNKGSGVPDRFSGSRSGADHYLTISN | | | | | | | | | mag.org/content/early/ |
| | LQPDDEADYYCEAWDNNNLGVFSGG | | | | | | | | | 2020/06/15/science.abc |
| | TKVTVL | | | | | | | | | 7424) |
| mAb-127 | DIQLTQSPSAMSASVGDRVTITCRASQ | IGHV3-48 | IGHJ6 | IGKV1-17 | IGKJ4 | 2911 | VRDYCNSVSC | 4101 | LQHNSYPL | Anna Wec et al., 2020 |
| | GINDNLAWFQQKPGKVPKRLIYAASN | (Human) | (Human) | (Human) | (Human) | | YTYYYIGMDV | | T | (https://science.science |
| | LQNGVPSRFSGSGSGTEFTLTISSLQPE | | | | | | | | | mag.org/content/early/ |
| | DFATYYCLQHNSYPLTFGGGTKLEIK | | | | | | | | | 2020/06/15/science.abc |
| | | | | | | | | | | 7424) |
| mAb-128 | DIRMTQSPLSLPVTPGEPASISCRSSQS | IGHV1-18 | IGHJ6 | IGKV2-28 | IGKJ3 | 2912 | ATSASSYSRYY | 4102 | MQALQTP | Anna Wec et al., 2020 |
| | LLHSNGYNYLDWYLQKPGQSPQLLIYL | (Human) | (Human) | (Human) | (Human) | | FGLDV | | GVT | (https://science.science |
| | GSNRASGVPDRFSGSGSGTDFTLKISR | | | | | | | | | mag.org/content/early/ |
| | VEAEDVGVYYCMQALQTPGVTFGGG | | | | | | | | | 2020/06/15/science.abc |
| | TKVDIK | | | | | | | | | 7424) |
| mAb-129 | QPVLTQPPSASGTPGQRVTISCSGSYS | IGHV4-31 | IGHJ6 | IGLV1-44 | IGLJ3 | 2913 | ARDLAKWSY | 4103 | ATWDDSL | Anna Wec et al., 2020 |
| | NIGTNPANWYQQLPGTAPKLLIYNND | (Human) | (Human) | (Human) | (Human) | | GYYYSGMDV | | NGVV | (https://science.science |
| | QRPSGVPDRFSGSKSGTSASLAISGLQ | | | | | | | | | mag.org/content/early/ |
| | SEDETDYYCATWDDSLNGVVFGGGTK | | | | | | | | | 2020/06/15/science.abc |
| | LTVL | | | | | | | | | 7424) |
| mAb-13 | DIRMTQSPLSLPVTRGQPASISCRSSH | IGHV1-69 | IGHJ6 | IGKV2-30 | IGKJ4 | 2914 | AREEYSGTVH | 4104 | MQGTDW | Anna Wec et al., 2020 |
| | NVVHSDGKTYLNWFHQRPGQAPRRL | (Human) | (Human) | (Human) | (Human) | | NFFGMDV | | PRS | (https://science.science |
| | IYQVSKRDSGVPDRFSGSGSGSDFTLTI | | | | | | | | | mag.org/content/early/ |
| | SRVEAEDVGVYYCMQGTDWPRSFGG | | | | | | | | | 2020/06/15/science.abc |
| | GTKVEIK | | | | | | | | | 7424) |
| mAb-130 | EIVLTQSPSSLSASVGDRVTITCRASRSI | IGHV3-9 | IGHJ6 | IGKV1-39 | IGKJ1 | 2915 | AKDGRYCSGI | 4105 | LHTYTTPRT | Anna Wec et al., 2020 |
| | SSYLNWYQQKPGKAPNLLIYDASTLQS | (Human) | (Human) | (Human) | (Human) | | SCRTGMDV | | | (https://science.science |
| | GVPSRFSGSGSGTDFSLTISSLQPEDFA | | | | | | | | | mag.org/content/early/ |
| | TYYCLHTYTTPRTFGQGTKVEIK | | | | | | | | | 2020/06/15/science.abc |
| | | | | | | | | | | 7424) |
| mAb-131 | EIVLTQSPATLSVSPGERITLSCRASHSV | IGHV3-48 | IGHJ3 | IGKV3-15 | IGKJ4 | 2916 | ARGLLDYLHD | 4106 | QQYNYWP | Anna Wec et al., 2020 |
| | SSNLAWYQQKPGQVPRLLIYGASARA | (Human) | (Human) | (Human) | (Human) | | AFDI | | PLT | (https://science.science |
| | TGIPARFSGSGSGTEFTLTISSLQSEDFA | | | | | | | | | mag.org/content/early/ |
| | VYYCQQYNYWPPLTFGGGTKVEIK | | | | | | | | | 2020/06/15/science.abc |
| | | | | | | | | | | 7424) |
| mAb-132 | DIQMTQSPSSLSASVGDRVTITCRASQ | IGHV4-38- | IGHJ3 | IGKV1-39 | IGKJ5 | 2917 | ASRHLDLLPIG | 4107 | QQSYRFPI | Anna Wec et al., 2020 |
| | SISTYLNWYQQKTGKAPELLIYVASSLQ | 2 | (Human) | (Human) | (Human) | | SFDV | | T | (https://science.science |
| | SGVPSRFSGSGSGTDFTLTISSLQPEDF | (Human) | | | | | | | | mag.org/content/early/ |
| | ATYYCQQSYRFPITFGQGTRLEIK | | | | | | | | | 2020/06/15/science.abc |
| | | | | | | | | | | 7424) |
| mAb-133 | EIVLTQSPATLSLSPGERATLSCRASQS | IGHV3-49 | IGHJ6 | IGKV3-11 | IGKJ3 | 2918 | TRGSGMFYG | 4108 | QQRTNWP | Anna Wec et al., 2020 |
| | VGTYLAWYQQKHGQAPRLLISDVSKR | (Human) | (Human) | (Human) | (Human) | | SSSGMDV | | GAT | (https://science.science |
| | ATGIPARFSGSGSGTDFTLTITSLEPEDF | | | | | | | | | mag.org/content/early/ |
| | AVYYCQQRTNWPGATFGPGTKVDIK | | | | | | | | | 2020/06/15/science.abc |
| | | | | | | | | | | 7424) |

| | | | | | Not | | | | | |
|---|---|---|---|---|---|---|---|---|---|---|
| | Ab | | | Neutral- | Neutral- | | | SEQ | | SEQ |
| | or | | Doesn't | ising | ising | Protein + | | ID | | ID |
| Name | Nb | Binds to | Bind to | Vs | Vs | Epitope | Origin | NO.: | VH or VHH | NO.: |
| mAb-134 | Ab | 229E | NL63, | | | S; Unk | B-cells; SARS-CoV1 | 813 | EVQLLESGAEVKKPGSSVKVSCKTSGGT | 1880 |
| | | (weak), | OC43 | | | | Human Patient | | FNSYTISWVRQAPGQGLEWMGGIIPIL | |
| | | HKU1 | | | | | | | DTPHYAQKFRGRVTITADKSTSTAFMDL | |
| | | (weak), | | | | | | | SSLTSEDTAVYYCAIRRDYSDYRDFDYW | |
| | | SARS-CoV1 | | | | | | | GQGTLVTVSS | |
| | | (weak), | | | | | | | | |
| | | SARS-CoV2 | | | | | | | | |
| | | (weak) | | | | | | | | |
| mAb-135 | Ab | HKU1 | 229E, | | | S; Unk | B-cells; SARS-CoV1 | 814 | EVQLVESGPGLVKPSETLSLACTVSGGSI | 1881 |
| | | (weak), | NL63, | | | | Human Patient | | SNYYWNWVRQPPGKGLEWIGNIYYSGS | |
| | | SARS-CoV1 | OC43 | | | | | | TTFNPSLKSRVTISVDTSRNQFSLKLSSVT | |
| | | (weak), | | | | | | | AADTAVYYCARQSSSWYNPYYFDQWG | |
| | | SARS-CoV2 | | | | | | | QGTLVTVSS | |
| | | (weak) | | | | | | | | |
| mAb-136 | Ab | HKU1, SARS- | 229E, | | | S; Unk | B-cells; SARS-CoV1 | 815 | QVQLVQSGGGLVQPGESLRLSCAASGF | 1882 |
| | | CoV1 | NL63, | | | | Human Patient | | NFSPYGMNWVRQAPGKGLEWIAYIISG | |
| | | (weak), | OC43 | | | | | | SGTIYYADSVKGRFTISRDNAQSSLYLQM | |
| | | SARS-CoV2 | | | | | | | NSLRAEDTAVYYCARGLLDYLHDAFDIW | |
| | | (weak) | | | | | | | GQGTMVTVSS | |
| mAb-137 | Ab | HKU1, SARS- | 229E, | | | S; Unk | B-cells; SARS-CoV1 | 816 | EVQLVESGAEVKNPGSSVKISCKSSGGTL | 1883 |
| | | CoV1 | NL63, | | | | Human Patient | | GDYAISWVRQAPGLGLEWLGGIMPLH | |
| | | (weak), | OC43 | | | | | | GTTGYSQRFRPRLTITADESARTAYMELT | |
| | | SARS-CoV2 | | | | | | | ALSSEDSAIYYCARDPSILNTGNHHWYD | |
| | | (weak) | | | | | | | LDLWGQGTEVTVSS | |
| mAb-138 | Ab | HKU1 | 229E, | | | S; Unk | B-cells; SARS-CoV1 | 817 | EVQLLESGGGVVQPGRSLRLSCAASGFT | 1884 |
| | | (weak), | NL63, | | | | Human Patient | | FNSYALFWVRQAPGKGLEWVAVVSYD | |
| | | SARS-CoV1 | OC43 | | | | | | GNNKYYADSVKGRFTISRDNSKNTLYLQ | |
| | | (weak), | | | | | | | MNSLKTEDTSVYYCARPRSGSYRQAIDY | |
| | | SARS-CoV2 | | | | | | | WGLGTLVTVSS | |
| | | (weak) | | | | | | | | |
| mAb-139 | Ab | 229E, HKU1 | OC43 | | | S; Unk | B-cells; SARS-CoV1 | 818 | QVQLVQSGGGLVQPGGSLRLSCAASGFI | 1885 |
| | | (weak), | | | | | Human Patient | | FSGHWMSWVRQAPGKGLEWVANIKQ | |
| | | NL63, SARS- | | | | | | | DGREKHYVDSVKGRFTISRDNAKNSVSL | |
| | | CoV1 | | | | | | | QMNSLRAEDTAVYYCVRQNVAIQYYYY | |
| | | (weak), | | | | | | | AMDVWGQGTTVTVSS | |
| | | SARS-CoV2 | | | | | | | | |
| | | (weak) | | | | | | | | |
| mAb-14 | Ab | SARS-CoV1, | 229E, | | | S; Unk | B-cells; SARS-CoV1 | 819 | EVQLVESGGGVVQPGRSLRLSCAASGFT | 1886 |
| | | SARS-CoV2 | HKU1, | | | | Human Patient | | FSGYPMHWVRQAPGKGLEWVALISFD | |
| | | | NL63, | | | | | | GDSKYYTDSVKARFAISRDNSKNTLFLQ | |
| | | | OC43 | | | | | | MNSLRVADTALYYCARAKGGSYSNAFD | |
| | | | | | | | | | YWGQGTLVTVSS | |
| mAb-140 | Ab | 229E, HKU1 | OC43 | | | S; Unk | B-cells; SARS-CoV1 | 820 | QVQLVESGAEVKKPGSSVKVSCKASGGT | 1887 |
| | | (weak), | | | | | Human Patient | | LSDYAISWVRQAPGQGLEWMGGIMPI | |
| | | NL63, SARS- | | | | | | | FGSPGYAEIFQGRVTITADESKSTVYMEL | |
| | | CoV1 | | | | | | | TSLRSEDTAVYYCARDPSILDTGNHHWY | |
| | | (weak), | | | | | | | DLDIWGQGTMVTVSS | |
| | | SARS-CoV2 | | | | | | | | |
| | | (weak) | | | | | | | | |
| mAb-141 | Ab | 229E, HKU1 | OC43 | | | S; Unk | B-cells; SARS-CoV1 | 821 | QVQLVQSGAEVKKPGSSVKVSCKTSGAT | 1888 |
| | | (weak), | | | | | Human Patient | | YKNSAFSWARQAPGQGFQWMGGIIPL | |
| | | NL63, SARS- | | | | | | | FGVPHYVQMFQGRVTITADESTSAVYM | |
| | | CoV1 | | | | | | | ELSGLTSDDTAVYYCAREEYSGTVHNFF | |
| | | (weak), | | | | | | | GMDVWGQGTTVTVSS | |
| | | SARS-CoV2 | | | | | | | | |
| | | (weak) | | | | | | | | |
| mAb-142 | Ab | 229E, HKU1 | OC43 | | | S; Unk | B-cells; SARS-CoV1 | 822 | EVQLVESGGGLVQPGGSLRLSCSASEFT | 1889 |
| | | (weak), | | | | | Human Patient | | LRSHAMHWVRQAPGKGLEYVSGISTDG | |
| | | NL63, SARS- | | | | | | | SGRFYADSVKGRFTISRDNSKNKLFLQM | |
| | | CoV1 | | | | | | | SSLRPEDTAVYYCVRDWGSSTHYDVFDL | |
| | | (weak), | | | | | | | WGQGTMVTVSS | |
| | | SARS-CoV2 | | | | | | | | |
| | | (weak) | | | | | | | | |
| mAb-143 | Ab | 229E, 229E | | | | S; Unk | B-cells; SARS-CoV1 | 823 | QVQLVQSGAEVKKPGSSVKVSCKASGG | 1890 |
| | | (weak), | | | | | Human Patient | | TLADYAISWVRQAPGQGLEWMGGIKP | |
| | | HKU1 | | | | | | | LHGAAGYSQHFRGRLSITADESASTAYM | |
| | | (weak), | | | | | | | ELTGLRSEDTAMYYCARDPSILNTGNHH | |
| | | NL63 | | | | | | | WYDLDLWGQGTMVTVSS | |
| | | (weak), | | | | | | | | |
| | | OC43 | | | | | | | | |
| | | (weak), | | | | | | | | |
| | | SARS-CoV1 | | | | | | | | |
| | | (weak), | | | | | | | | |
| | | SARS-CoV2 | | | | | | | | |
| | | (weak) | | | | | | | | |

| | | | | | | SEQ | | SEQ | | |
|---|---|---|---|---|---|---|---|---|---|---|
| | | Heavy V | Heavy J | Light V | Light J | ID | | ID | | |
| Name | VL | Gene | Gene | Gene | Gene | NO.: | CDRH3 | NO.: | CDRL3 | Sources |
| mAb-134 | QPVLTQSPSASASLGGSVKLTCTLTSG | IGHV1-69 | IGHJ4 | IGLV4-69 | IGLJ3 | 2919 | AIRRDYSDYR | 4109 | HTWGTDI | Anna Wec et al., 2020 |
| | HSTYAIAWHQQQPEKGPRFLMKLNS | (Human) | (Human) | (Human) | (Human) | | DFDY | | QV | (https://science.science |
| | DGSHNKGDGIPDRFSGSSSGAERYLTI | | | | | | | | | mag.org/content/early/ |
| | SSLQSEDEADYYCHTWGTDIQVFGGG | | | | | | | | | 2020/06/15/science.abc |
| | TKLTVL | | | | | | | | | 7424) |
| mAb-135 | NFMLTQPHSVSESPGKTVTISCTRSSG | IGHV4-59 | IGHJ4 | IGLV6-57 | IGLI6 | 2920 | ARQSSSWYN | 4110 | QSYDSSSQ | Anna Wec et al., 2020 |
| | SIANNYVQWLQQRPGSSPTTIIYEDNQ | (Human) | (Human) | (Human) | (Human) | | PYYFDQ | | V | (https://science.science |
| | RPSGVPDRFSGSIDASSNSASLTISGLK | | | | | | | | | mag.org/content/early/ |
| | TEDEADYYCQSYDSSSQVFGGGTKVT | | | | | | | | | 2020/06/15/science.abc |
| | VL | | | | | | | | | 7424) |
| mAb-136 | DIVLTQSPATLSVSPGERITLSCRASHS | IGHV3-48 | IGHJ3 | IGKV3-15 | IGKJ4 | 2921 | ARGLLDYLHD | 4111 | QQYNYWP | Anna Wec et al., 2020 |
| | VSSNLAWYQQKPGQVPRLLIYGASAR | (Human) | (Human) | (Human) | (Human) | | AFDI | | PLT | (https://science.science |
| | ATGIPARFSGSGSGTEFTLTISSLQSEDF | | | | | | | | | mag.org/content/early/ |
| | AVYYCQQYNYWPPLTFGGGTKVEIK | | | | | | | | | 2020/06/15/science.abc |
| | | | | | | | | | | 7424) |
| mAb-137 | ETTLTQSPLSLSVTLGQAASISCRPNLG | IGHV1-69 | IGHJ4 | IGKV2-30 | IGKJ2 | 2922 | ARDPSILNTG | 4112 | MQGTEW | Anna Wec et al., 2020 |
| | LMHTDGNTYLNWFHQRPGQSPRRLI | (Human) | (Human) | (Human) | (Human) | | NHHWYDLDL | | PRT | (https://science.science |
| | YKVSNRDSGVPDRFAGSGSGTHFTLEI | | | | | | | | | mag.org/content/early/ |
| | SGVEADDVGVYYCMQGTEWPRTFG | | | | | | | | | 2020/06/15/science.abc |
| | QGTKLEIK | | | | | | | | | 7424) |
| mAb-138 | DIRMTQSPSTLSASVGDRVTITCRASQ | IGHV3-30 | IGHJ4 | IGKV1-5 | IGKJ2 | 2923 | ARPRSGSYRQ | 4113 | QQYNSLYT | Anna Wec et al., 2020 |
| | TIGSWLAWYQQKPGKAPNLLIYKASSL | (Human) | (Human) | (Human) | (Human) | | AIDY | | | (https://science.science |
| | ESGVPSRFSGSGSGTEFTLTISSLQPDD | | | | | | | | | mag.org/content/early/ |
| | FATYYCQQYNSLYTFGQGTKLEIK | | | | | | | | | 2020/06/15/science.abc |
| | | | | | | | | | | 7424) |
| mAb-139 | ETTLTQSPGTLSVSPGERATLSCRASQS | IGHV3-7 | IGHJ6 | IGKV3-15 | IGKJ3 | 2924 | VRQNVAIQYY | 4114 | QQYHHWP | Anna Wec et al., 2020 |
| | VISNLAWYQQKPGQAPRLLIYGASTRA | (Human) | (Human) | (Human) | (Human) | | YYAMDV | | PYT | (https://science.science |
| | TGVPARFSGSGSGTEFTLTIASLQSEDF | | | | | | | | | mag.org/content/early/ |
| | AVYYCQQYHHWPPYTFGQGTKVDIK | | | | | | | | | 2020/06/15/science.abc |
| | | | | | | | | | | 7424) |
| mAb-14 | EIVLTQSPDSLAVSLGERATINCKSSQS | IGHV3-30 | IGHJ4 | IGKV4-1 | IGKJ3 | 2925 | ARAKGGSYSN | 4115 | QQYCSTPP | Anna Wec et al., 2020 |
| | VLYSSNNENCLAWYQQKPGQPPKLLI | (Human) | (Human) | (Human) | (Human) | | AFDY | | YT | (https://science.science |
| | YWASTRESGVPDRFSGSGSGTDFTLTI | | | | | | | | | mag.org/content/early/ |
| | SSLQAEDVAVYYCQQYCSTPPYTFGQ | | | | | | | | | 2020/06/15/science.abc |
| | GTKVDIK | | | | | | | | | 7424) |
| mAb-140 | EIVMTQSPLSLPVSLGQPASISCRSSQS | IGHV1-69 | IGHJ3 | IGKV2-30 | IGKJ1 | 2926 | ARDPSILDTG | 4116 | MQGTEW | Anna Wec et al., 2020 |
| | VIHTDGNTYLNWYHQRPGQSPRRLIY | (Human) | (Human) | (Human) | (Human) | | NHHWYDLDI | | PRT | (https://science.science |
| | KVSNRDSGVPDRFSGSGSVTDFTLKIS | | | | | | | | | mag.org/content/early/ |
| | RVEAEDVGVYYCMQGTEWPRTFGQ | | | | | | | | | 2020/06/15/science.abc |
| | GTKVEIK | | | | | | | | | 7424) |
| mAb-141 | DIVMTQSPLSLPVSRGQSASISCRSSHS | IGHV1-69 | IGHJ6 | IGKV2-30 | IGKJ3 | 2927 | AREEYSGTVH | 4117 | MQGTDW | Anna Wec et al., 2020 |
| | VVHSDGKTYVNWFHQRPGQAPRRLI | (Human) | (Human) | (Human) | (Human) | | NFFGMDV | | PRS | (https://science.science |
| | YQVSKRDSGVPDRFSGSGSGFDFTLKI | | | | | | | | | mag.org/content/early/ |
| | SRVEAEDVGVYFCMQGTDWPRSFGG | | | | | | | | | 2020/06/15/science.abc |
| | GTKVDIK | | | | | | | | | 7424) |
| mAb-142 | DIVMTQSPSSLSASVGDRVTITCRASQ | IGHV3- | IGHJ3 | IGKV1-39 | IGKJ5 | 2928 | VRDWGSSTH | 4118 | QQSYSTP | Anna Wec et al., 2020 |
| | SINIYLNWYQQKPGKAPKLLIYAASSLQ | 64D | (Human) | (Human) | (Human) | | YDVFDL | | LIT | (https://science.science |
| | SGVPSRFSGSGSGTDFTLTISSLQPEDF | (Human) | | | | | | | | mag.org/content/early/ |
| | ATYYCQQSYSTPLITFGQGTRLEIK | | | | | | | | | 2020/06/15/science.abc |
| | | | | | | | | | | 7424) |
| mAb-143 | DIRLTQSPLSLPVTLGQAASISCKSSHFI | IGHV1-69 | IGHJ3 | IGKV2-30 | IGKJ3 | 2929 | ARDPSILNTG | 4119 | MQGTEW | Anna Wec et al., 2020 |
| | VHTDGNTYLNWFHQRPGQSPRRLIYK | (Human) | (Human) | (Human) | (Human) | | NHHWYDLDL | | PRT | (https://science.science |
| | VSNRDSGVPDRFSGSGSGTDFTLEISG | | | | | | | | | mag.org/content/early/ |
| | VEAEDVGVYYCMQGTEWPRTFGQGT | | | | | | | | | 2020/06/15/science.abc |
| | KVDIK | | | | | | | | | 7424) |

| | | | | | Not | | | | | |
|---|---|---|---|---|---|---|---|---|---|---|
| | Ab | | | Neutral- | Neutral- | | | SEQ | | SEQ |
| | or | | Doesn't | ising | ising | Protein + | | ID | | ID |
| Name | Nb | Binds to | Bind to | Vs | Vs | Epitope | Origin | NO.: | VH or VHH | NO.: |
| mAb-144 | Ab | 229E, HKU1, | OC43 | | | S; Unk | B-cells; SARS-CoV1 | 824 | QVQLVQSGAELKKPGSSVKVSCKASGG | 1891 |
| | | NL63, SARS- | | | | | Human Patient | | TFYNSAFSWLRHAPGQGPEWMGGITP | |
| | | CoV1 | | | | | | | SLGRVGYSERFLARLTITADESTSTVYME | |
| | | (weak), | | | | | | | LTSLASEDTAVYYCARDASIVGTGNHLW | |
| | | SARS-CoV2 | | | | | | | YGLDFWGHGTTVTVSS | |
| | | (weak) | | | | | | | | |
| mAb-145 | Ab | 229E, HKU1 | OC43 | | | S; Unk | B-cells; SARS-CoV1 | 825 | EVQLVESGGHVVLPGKSLRLSCAGSGFG | 1892 |
| | | (weak) | | | | | Human Patient | | FPLYAMQWVRRAPGKGLEWVALVSYD | |
| | | NL63, SARS- | | | | | | | SSNIRYADSVKGRFTISRDNSQNTLYLQ | |
| | | CoV1 | | | | | | | MDSLRPEDTAMYYCARDNALQDGRPG | |
| | | (weak), | | | | | | | YFDSWGQGTLVTVSS | |
| | | SARS-CoV2 | | | | | | | | |
| | | (weak) | | | | | | | | |
| mAb-146 | Ab | 229E, HKU1 | OC43 | | | S; Unk | B-cells; SARS-CoV1 | 826 | EVQLVESGGGLVKPGGSLRLSCAASGFIF | 1893 |
| | | (weak), | | | | | Human Patient | | SDYYMSWIRQAPGKGLEWVSYITGSGR | |
| | | NL63, SARS- | | | | | | | TIHYADSVKGRFTISRDNAKNSVYLQMN | |
| | | CoV1 | | | | | | | SLRAEDTAVYYCARGHRFLEFPLNYFDP | |
| | | (weak), | | | | | | | WGQGTLVTVSS | |
| | | SARS-CoV2 | | | | | | | | |
| | | (weak) | | | | | | | | |
| mAb-147 | Ab | 229E, HKU1 | OC43 | | | S; Unk | B-cells; SARS-CoV1 | 827 | EVQLLESGGHVVLPGKSLRLSCAGSGFG | 1894 |
| | | (weak), | | | | | Human Patient | | FPLYAMQWVRRAPGKGLEWVALVSYD | |
| | | NL63 | | | | | | | SSNIRYADSVKGRFTISRDNSQNTLYLQ | |
| | | (weak), | | | | | | | MDSLRPEDTAMYYCARDNALQDGRPG | |
| | | SARS-CoV1 | | | | | | | YFDSWGQGTLVTVSS | |
| | | (weak), | | | | | | | | |
| | | SARS-CoV2 | | | | | | | | |
| | | (weak) | | | | | | | | |
| mAb-148 | Ab | 229E, HKU1 | OC43 | | | S; Unk | B-cells; SARS-CoV1 | 828 | EVQLVESGGGVVQPGRSLRLSCAASGFT | 1895 |
| | | (weak), | | | | | Human Patient | | FSKFAMHWVRQAPGKGLEWVAIISYDG | |
| | | NL63 | | | | | | | SHKNYADSVKGRFTISRDNSKNTVYLQV | |
| | | (weak), | | | | | | | DSLRAEDTAVYYCALLYGSGSYYNFVFFG | |
| | | SARS-CoV1 | | | | | | | WKDGSDAWGPGTTVTVSS | |
| | | (weak), | | | | | | | | |
| | | SARS-CoV2 | | | | | | | | |
| | | (weak) | | | | | | | | |
| mAb-149 | Ab | 229E | OC43 | | | S; Unk | B-cells; SARS-CoV1 | 829 | QVQLVQSGAEVKKPGSSVKVSCKASGG | 1896 |
| | | (weak), | | | | | Human Patient | | MFTDYAISWVRQAPGQRLEWMGGILP | |
| | | HKU1, NL63 | | | | | | | AFAASGSPGYAPIFRGRATFSADVSTSTA | |
| | | (weak), | | | | | | | YLELTNLKPEDTAVYYCARDPSILNTGNH | |
| | | SARS-CoV1 | | | | | | | HWYDLDLWGQGTEVTVSS | |
| | | (weak), | | | | | | | | |
| | | SARS-CoV2 | | | | | | | | |
| | | (weak) | | | | | | | | |
| mAb-15 | Ab | SARS-CoV1, | 229E, | | | S; Unk | B-cells; SARS-Cov1 | 830 | QVQLVQSGAELKKPGSSVRVSCKAAGG | 1897 |
| | | SARS-CoV2 | HKU1, | | | | Human Patient | | TLTNYAISWVRQAPGQGFEWMGGIMP | |
| | | | NL63, | | | | | | VSHTAGYAQKFQGRVTFTADESATTAY | |
| | | | OC43 | | | | | | MDLTSLRPEDTAIYYCARDPSIHYTGNH | |
| | | | | | | | | | HWYDLDIWGQGTMVTVSS | |
| mAb-150 | Ab | 229E | OC43 | | | S; Unk | B-cells; SARS-CoV1 | 831 | QVQLVQSGAELKKPGSSVRVSCKAAGG | 1898 |
| | | (weak), | | | | | Human Patient | | TLTNYAISWVRQAPGQGFEWMGGIMP | |
| | | HKU1 | | | | | | | VSHTAGYAQKFQGRVTFTADESATTAY | |
| | | (weak), | | | | | | | MDLTSLRPEDTAIYYCARDPSIHYTGNH | |
| | | NL63, SARS- | | | | | | | HWYDLDIWGQGTMVTVSS | |
| | | CoV1 | | | | | | | | |
| | | (weak), | | | | | | | | |
| | | SARS-CoV2 | | | | | | | | |
| | | (weak) | | | | | | | | |
| mAb-151 | Ab | 229E | OC43 | | | S; Unk | B-cells; SARS-CoV1 | 832 | QVQLVQSGAEVKKPGSSMRVSCRVSG | 1899 |
| | | (weak), | | | | | Human Patient | | GTFITHAMSWVRQAPGQGPEWMGGI | |
| | | HKU1 | | | | | | | VPLFGRASYAQPSQTRVQITADESTSTVY | |
| | | (weak), | | | | | | | LEVPSLTSEDTAVYYCVRDSEPYTATRSQ | |
| | | NL63 | | | | | | | NHYWYDMDVWGQGTTVTVSS | |
| | | (weak), | | | | | | | | |
| | | SARS-CoV1 | | | | | | | | |
| | | (weak), | | | | | | | | |
| | | SARS-CoV2 | | | | | | | | |
| | | (weak) | | | | | | | | |

| | | | | | | SEQ | | SEQ | | |
|---|---|---|---|---|---|---|---|---|---|---|
| | | Heavy V | Heavy J | Light V | Light J | ID | | ID | | |
| Name | VL | Gene | Gene | Gene | Gene | NO.: | CDRH3 | NO.: | CDRL3 | Sources |
| mAb-144 | ETTLTQSPLFLPVTLGQPASISCTSSVH | IGHV1-69 | IGHJ6 | IGKV2-30 | IGKJ3 | 2930 | ARDASIVGTG | 4120 | MQGTDW | Anna Wec et al., 2020 |
| | VVHSDGNTYLNWFQQRPGQSPRRLIY | (Human) | (Human) | (Human) | (Human) | | NHLWYGLDF | | PRT | (https://science.science |
| | KVSNRDSGVPDRFSGSGSGTYFTLKIS | | | | | | | | | mag.org/content/early/ |
| | RVEAEDVGVYYCMQGTDWPRTFGQ | | | | | | | | | 2020/06/15/science.abc |
| | GTKVDIK | | | | | | | | | 7424) |
| mAb-145 | ETTLTQSPATLSLSPGERATLSCRASQSI | IGHV3-30 | IGHJ5 | IGKV3-11 | IGKJ3 | 2931 | ARDNALQDG | 4121 | QQRFSWY | Anna Wec et al., 2020 |
| | NDYLGWYQHRPGQAPRLLIHDASTRA | (Human) | (Human) | (Human) | (Human) | | RPGYFDS | | N | (https://science.science |
| | PGIPVRFSGSGSGTDFTLTISSLEPEDSA | | | | | | | | | mag.org/content/early/ |
| | VYYCQQRFSWYNFGPGTKVEIK | | | | | | | | | 2020/06/15/science.abc |
| | | | | | | | | | | 7424) |
| mAb-146 | QSVLTQPASVSGSPGQSITISCAVTSSD | IGHV3-11 | IGHJ5 | IGLV2-23 | IGLJ3 | 2932 | ARGHRFLEFP | 4122 | CSYGGRST | Anna Wec et al., 2020 |
| | VGSYNLVSWHQQHPGKAPKLMIYEV | (Human) | (Human) | (Human) | (Human) | | LNYFDP | | SVI | (https://science.science |
| | NKRPSGVSNRFSGSKSGNTASLTISGL | | | | | | | | | mag.org/content/early/ |
| | QAEDEAVYYCCSYGGRSTSVVFGGGT | | | | | | | | | 2020/06/15/science.abc |
| | KLTVL | | | | | | | | | 7424) |
| mAb-147 | DIRLTQSPATLSLSPGERATLSCRASQSI | IGHV3-30 | IGHJ5 | IGKV3-11 | IGKJ2 | 2933 | ARDNALQDG | 4123 | QQRFSWY | Anna Wec et al., 2020 |
| | NDYLGWYQHRPGQAPRLLIHDASTRA | (Human) | (Human) | (Human) | (Human) | | RPGYFDS | | N | (https://science.science |
| | PGIPVRFSGSGSGTDFTLTISSLEPEDSA | | | | | | | | | mag.org/content/early/ |
| | VYYCQQRFSWYNFGPGTKLEIK | | | | | | | | | 2020/06/15/science.abc |
| | | | | | | | | | | 7424) |
| mAb-148 | QPVLTQPASVSGSPGQSITISCTGTTSD | IGHV3-30 | IGHJ6 | IGLV2-14 | IGLJ3 | 2934 | ALLYGSGSYY | 4124 | SSYTSGGTL | Anna Wec et al., 2020 |
| | VGGYDYVSWYQQRPGKAPKLIIYDVI | (Human) | (Human) | (Human) | (Human) | | NFVFFGWKD | | V | (https://science.science |
| | NRPSGVSNRFSGSKSGNTASLTISGLQ | | | | | | GSDA | | | mag.org/content/early/ |
| | ADDETDYYCSSYTSGGTLVFGTGTKLT | | | | | | | | | 2020/06/15/science.abc |
| | VL | | | | | | | | | 7424) |
| mAb-149 | DIQMTQSPLSLPVGLGQSASISCRSSQ | IGHV1-69 | IGHJ4 | IGKV2-30 | IGKJ1 | 2935 | ARDPSILNTG | 4125 | MQATEWP | Anna Wec et al., 2020 |
| | WVVHTDGNTYLNWFHQRPGQSPRR | (Human) | (Human) | (Human) | (Human) | | NHHWYDLDL | | RT | (https://science.science |
| | LIYKVSNRDSGVPDRFSGSGSGTDFTL | | | | | | | | | mag.org/content/early/ |
| | RISRVEAEDVGVYYCMQATEWPRTFG | | | | | | | | | 2020/06/15/science.abc |
| | QGTKVEIK | | | | | | | | | 7424) |
| mAb-15 | DIRLTQSPLSLPVTLGQPASISCRSSQRI | IGHV1-69 | IGHJ3 | IGKV2-30 | IGKJ3 | 2936 | ARDPSIHYTG | 4126 | MQGTEW | Anna Wec et al., 2020 |
| | VHTDGNTYLNWFLQRPGQSPRRLIYK | (Human) | (Human) | (Human) | (Human) | | NHHWYDLDI | | PRT | (https://science.science |
| | VSNRDSGVPDRFSGSGSGTDFTLKISR | | | | | | | | | mag.org/content/early/ |
| | VEAEDVGIYYCMQGTEWPRTFGQGT | | | | | | | | | 2020/06/15/science.abc |
| | KVDIK | | | | | | | | | 7424) |
| mAb-150 | DIQLTQSPLSLPVTLGQPASISCRSSQRI | IGHV1-69 | IGHJ3 | IGKV2-30 | IGKJ1 | 2937 | ARDPSIHYTG | 4127 | MQGTEW | Anna Wec et al., 2020 |
| | VHTDGNTYLNWFLQRPGQSPRRLIYK | (Human) | (Human) | (Human) | (Human) | | NHHWYDLDI | | PRT | (https://science.science |
| | VSNRDSGVPDRFSGSGSGTDFTLKISR | | | | | | | | | mag.org/content/early/ |
| | VEAEDVGIYYCMQGTEWPRTFGQGT | | | | | | | | | 2020/06/15/science.abc |
| | KVEIK | | | | | | | | | 7424) |
| mAb-151 | ETTLTQSPLSLSVTLGQSASISCRASQT | IGHV1-69 | (Human) | IGKV2-30 | IGKJ1 | 2938 | VRDSEPYTAT | 4128 | MQGTDW | Anna Wec et al., 2020 |
| | VVHSVDGNTYLNWFHQRPGQSPRRLI | (Human) | IGHJ6 | (Human) | (Human) | | RSQNHYWYD | | PRT | (https://science.science |
| | YKVSNRDSGVPDRFSGSGSGTDFTLRI | | | | | | MDV | | | mag.org/content/early/ |
| | SRVEAEDIGIYYCMQGTDWPRTFGQG | | | | | | | | | 2020/06/15/science.abc |
| | TKVEIK | | | | | | | | | 7424) |

| | | | | | Not | | | | | |
|---|---|---|---|---|---|---|---|---|---|---|
| | Ab | | | Neutral- | Neutral- | | | SEQ | | SEQ |
| | or | | Doesn't | ising | ising | Protein + | | ID | | ID |
| Name | Nb | Binds to | Bind to | Vs | Vs | Epitope | Origin | NO.: | VH or VHH | NO.: |
| mAb-152 | Ab | 229E | OC43 | | | S; Unk | B-cells; SARS-CoV1 | 833 | QVQLVQSGAELKKPGSSVRVSCKAAGG | 1900 |
| | | (weak), | | | | | Human Patient | | TLTNYAISWVRQAPGQGFEWMGGIMP | |
| | | HKU1 | | | | | | | VSHTAGYAQKFQGRVTFTADESATTAY | |
| | | (weak), | | | | | | | MDLTSLRPEDTAIYYCARDPSIHYTGNH | |
| | | NL63 | | | | | | | HWYDLDIWGQGTTVTVSS | |
| | | (weak), | | | | | | | | |
| | | SARS-CoV1 | | | | | | | | |
| | | (weak), | | | | | | | | |
| | | SARS-CoV2 | | | | | | | | |
| | | (weak) | | | | | | | | |
| mAb-153 | Ab | 229E | OC43 | | | S; Unk | B-cells; SARS-CoV1 | 834 | QVQLVQSGAEVKKPGSSVKVSCKASGG | 1901 |
| | | (weak), | | | | | Human Patient | | TLSHYAISWVRQAPGQGLEWMGGIMP | |
| | | HKU1 | | | | | | | VSGTVGYAQKFQGRVKFTADEYASTAY | |
| | | (weak), | | | | | | | MELTNLRSEDSAVYFCARDPSIVDSGPH | |
| | | NL63 | | | | | | | HWYDLDIWGQGTMVTVSS | |
| | | (weak), | | | | | | | | |
| | | SARS-CoV1 | | | | | | | | |
| | | (weak), | | | | | | | | |
| | | SARS-CoV2 | | | | | | | | |
| | | (weak) | | | | | | | | |
| mAb-154 | Ab | 229 | OC43 | | | S; Unk | B-cells; SARS-CoV1 | 835 | QVQLVESGAEVKRPGASVKVSCKASGY | 1902 |
| | | (weak), | | | | | Human Patient | | AFSDYYMHWVRQAPGQGPEWMGWI | |
| | | HKU1 | | | | | | | NPNSGDTGYPQKFRGWVTMTRDTSVS | |
| | | (weak), | | | | | | | TAYMELKRLKSDDTAVYYCASGPNYFDY | |
| | | NL63 | | | | | | | WGQGTLVTVSS | |
| | | (weak), | | | | | | | | |
| | | SARS-CoV1 | | | | | | | | |
| | | (weak), | | | | | | | | |
| | | SARS-CoV2 | | | | | | | | |
| | | (weak) | | | | | | | | |
| mAb-155 | Ab | 229E | OC43 | | | S; Unk | B-cells; SARS-CoV1 | 836 | EVQLLESGGGLVKPGGSLRLSCEASGFTF | 1903 |
| | | (weak), | | | | | Human Patient | | SNYNMNWVRQAPGKGLEWVSSISGSS | |
| | | HKU1 | | | | | | | SYISYADSVKGRFTISRDNAKNSLYLQMN | |
| | | (weak), | | | | | | | SLRVEDTAVYYCARADRDYDFWSDPPLI | |
| | | NL63 | | | | | | | DHWGQGTLVTVSS | |
| | | (weak), | | | | | | | | |
| | | SARS-CoV1 | | | | | | | | |
| | | (weak), | | | | | | | | |
| | | SARS-CoV2 | | | | | | | | |
| | | (weak) | | | | | | | | |
| mAb-156 | Ab | 229 | NL63, | | | S; Unk | B-cells; SARS-CoV1 | 837 | EVQLVESGGGLIQPGGSLRLSCAASGFT | 1904 |
| | | (weak), | OC43 | | | | Human Patient | | VTDNYMSWVRQAPGKGLEWVSVLYSG | |
| | | HKU1 | | | | | | | GSTYYADAVQGRFSISRDNSKNALYLQM | |
| | | (weak), | | | | | | | NSLRAEDTAVYYCARGFGNGWSYYFDY | |
| | | SARS-CoV1 | | | | | | | WGQGTLVTVSS | |
| | | (weak), | | | | | | | | |
| | | SARS-CoV2 | | | | | | | | |
| | | (weak) | | | | | | | | |
| mAb-157 | Ab | HKU1, SARS- | 229E, | | | S; Unk | B-cells; SARS-CoV1 | 838 | EVQLVQSGGGLVQPGGSLRLSCAASGF | 1905 |
| | | CoV1 | NL63, | | | | Human Patient | | TFSSYSMSWVRQAPGKGLEWVSYITRSS | |
| | | (weak), | OC43 | | | | | | DNIYYAESVKGRFTISRDSAKNSLYLHMN | |
| | | SARS-CoV2 | | | | | | | SLRDEDTAVYYCARDPGLEYSGNYFSYYY | |
| | | (weak) | | | | | | | YAMDVWGQGTTVTVSS | |
| mAb-158 | Ab | HKU1, SARS- | 229E, | | | S; Unk | B-cells; SARS-CoV1 | 839 | QVQLVQSGAEVKKPGSSVKVSCKASGG | 1906 |
| | | CoV1 | NL63, | | | | Human Patient | | TFSTHAISWVRQAPGHGPEWMGGIIPL | |
| | | (weak), | OC43 | | | | | | FGTSESAQRFQARVRFTADESTSTAYME | |
| | | SARS-CoV2 | | | | | | | LSSLTSEDTAVYYCVRDSDPYTATSRNNH | |
| | | (weak) | | | | | | | YWYDMDVWGQGTTVTVSS | |
| mAb-159 | Ab | HKU1, SARS- | 229E, | | | S; Unk | B-cells; SARS-CoV1 | 840 | QVQLVQSGAEVKKPGSSVKVSCKVSGG | 1907 |
| | | CoV1 | NL63, | | | | Human Patient | | RFSDYAISWLRQAPVKGLEWMGGIIPRL | |
| | | (weak), | OC43 | | | | | | NRKGYSQDFQGRLTFTADESTSTAYMEL | |
| | | SARS-CoV2 | | | | | | | SGLTSEDTAVYYCARDPTFLNSGNHFWY | |
| | | (weak) | | | | | | | AVDIWGQGTTVTVSS | |
| mAb-16 | Ab | SARS-CoV1, | 229E, | | | S; Unk | B-cells; SARS-CoV1 | 841 | EVQLVESGAEVRTPGSSVKLSCKASGGT | 1908 |
| | | SARS-CoV2 | HKU1, | | | | Human Patient | | FSTHAFSWVRQAPGQRPEWMGGIIPIF | |
| | | | NL63, | | | | | | GESKDTQKFQGRVTFTADESTTTVYMEL | |
| | | | OC43 | | | | | | RSLKSDDTAIYYCVRDSDPYTATYRNNHY | |
| | | | | | | | | | WYAMDVWGQGTTVTVSS | |
| mAb-160 | Ab | HKU1, SARS- | 229E, | | | S; Unk | B-cells; SARS-CoV1 | 842 | EVQLVESGGGVVKPGGSLRVSCVGSGF | 1909 |
| | | CoV1 | NL63, | | | | Human Patient | | TFSDHYMSWIRQAPGKGLEIISYISTDGS | |
| | | (weak), | OC43 | | | | | | YINDADSVKGRFINSRDNAKNSVYLQLN | |
| | | SARS-CoV2 | | | | | | | SLRAEDTAVYYCARMGPSGSGSLDYWG | |
| | | (weak) | | | | | | | QGSLVTVSS | |

| | | | | | | SEQ | | SEQ | | |
|---|---|---|---|---|---|---|---|---|---|---|
| | | Heavy V | Heavy J | Light V | Light J | ID | | ID | | |
| Name | VL | Gene | Gene | Gene | Gene | NO.: | CDRH3 | NO.: | CDRL3 | Sources |
| mAb-152 | DIVMTQSPLSLPVTLGQPASISCRSSQR | IGHV169 | IGHJ6 | IGKV2-30 | IGKJ1 | 2939 | ARDPSIHYTG | 4129 | MQGTEW | Anna Wec et al., 2020 |
| | IVHTDGNTYLNWFLQRPGQSPRRLIYK | (Human) | (Human) | (Human) | (Human) | | NHHWYDLDI | | PRT | (https://science.science |
| | VSNRDSGVPDRFSGSGSGTDFTLKISR | | | | | | | | | mag.org/content/early/ |
| | VEAEDVGIYYCMQGTEWPRTFGQGT | | | | | | | | | 2020/06/15/science.abc |
| | KVEIK | | | | | | | | | 7424) |
| mAb-153 | DIRMTQSPLSLPVTLGQPASISCRSSQF | IGHV1-69 | IGHJ3 | IGKV2-30 | IGKJ3 | 2940 | ARDPSIVDSG | 4130 | MQATEWP | Anna Wec et al., 2020 |
| | VVHTDGNTYLNWFQQRPGQSPRRLIY | (Human) | (Human) | (Human) | (Human) | | PHHWYDLDI | | RT | (https://science.science |
| | KVSNRDSGVPDRFSGSGSGTDFTLKIS | | | | | | | | | mag.org/content/early/ |
| | RVEAEDVGVYYCMQATEWPRTFGQG | | | | | | | | | 2020/06/15/science.abc |
| | TKVDIK | | | | | | | | | 7424) |
| mAb-154 | SYVLTQPPSVSVSPGQTARITCSADGL | IGHV1-2 | IGHJ4 | IGLV3-25 | IGLJ7 | 2941 | ASGPNYFDY | 4131 | QSADSNDS | Anna Wec et al., 2020 |
| | PKQYSYWYQQKPGQAPVMVIYKDTE | (Human) | (Human) | (Human) | (Human) | | | | SPV | (https://science.science |
| | RPSGIPERFSGSSSGTTATLTISGVQAE | | | | | | | | | mag.org/content/early/ |
| | DEADYYCQSADSNDSSPVFGGGTQLT | | | | | | | | | 2020/06/15/science.abc |
| | VL | | | | | | | | | 7424) |
| mAb-155 | ETTLTQSPATLSLSPGEGATLSCRASQS | IGHV3-21 | IGHJ4 | IGKV3-11 | IGKJ1 | 2942 | ARADRDYDF | 4132 | HQRSNWP | Anna Wec et al., 2020 |
| | VSSSLAWYQQKPGQAPRLLIYDASNR | (Human) | (Human) | (Human) | (Human) | | WSDPPLIDH | | YT | (https://science.science |
| | ATGIPARFSGSGSGTDYTLTISSLEPEDF | | | | | | | | | mag.org/content/early/ |
| | AVYYCHQRSNWPYTFGQGTKVEIK | | | | | | | | | 2020/06/15/science.abc |
| | | | | | | | | | | 7424) |
| mAb-156 | DIVLTQTPSSLSASVGDRVTITCRASQTI | IGHV3-53 | IGHJ4 | IGKV1-39 | IGKJ1 | 2943 | ARGFGNGWS | 4133 | QQSYSIPW | Anna Wec et al., 2020 |
| | ATYLSWYQQKPGKAPKLLIYAVSSLQS | (Human) | (Human) | (Human) | (Human) | | YYFDY | | T | (https://science.science |
| | GVPSRFSGSGSGTDFTLTIGSLQPEDF | | | | | | | | | mag.org/content/early/ |
| | ATYYCQQSYSIPWTFGQGTKVDIK | | | | | | | | | 2020/06/15/science.abc |
| | | | | | | | | | | 7424) |
| mAb-157 | EIVMTQSPSSLSASVGDRVTITCRASQS | IGHV3-48 | IGHJ6 | IGKV1-39 | IGKJ4 | 2944 | ARDPGLEYSG | 4134 | QHSYSSP | Anna Wec et al., 2020 |
| | ISYYLNWYQQKPGKAPKLLIYAASSLQS | (Human) | (Human) | (Human) | (Human) | | NYFSYYYYAM | | PLT | (https://science.science |
| | GVPSRFSGSGSGTDFILTISSLQPEDIAT | | | | | | DV | | | mag.org/content/early/ |
| | YYCQHSYSSPPLTFGGGTKVEIK | | | | | | | | | 2020/06/15/science.abc |
| | | | | | | | | | | 7424) |
| mAb-158 | ETTLTQSPLSLPVTLGQPASISCRSSQIV | IGHV1-69 | IGHJ6 | IGKV2-30 | IGKJ3 | 2945 | VRDSDPYTAT | 4135 | MQGTDW | Anna Wec et al., 2020 |
| | VHSDGNTYLNWFHQRPGQSPRRLIYK | (Human) | (Human) | (Human) | (Human) | | SRNNHYWYD | | PRT | (https://science.science |
| | VSNRDSGVPDRFSGSGSGTDFTLKISR | | | | | | MDV | | | mag.org/content/early/ |
| | VEAEDIGVYYCMQGTDWPRTFGQGT | | | | | | | | | 2020/06/15/science.abc |
| | KVDIK | | | | | | | | | 7424) |
| mAb-159 | DIRLTQSPLSLSVTLGQAASISCTCSQT | IGHV1-69 | IGHJ6 | IGKV2-30 | IGKJ1 | 2946 | ARDPTFLNSG | 4136 | MQTTDWP | Anna Wec et al., 2020 |
| | AVHSDGNTYLNWFHQRPGQSPRRLIY | (Human) | (Human) | (Human) | (Human) | | NHFWYAVDI | | RT | (https://science.science |
| | KVSNRDSGVPDRFSGSGSGTDFTLKIS | | | | | | | | | mag.org/content/early/ |
| | RVEAEDVGIYYCMQTTDWPRTFGQG | | | | | | | | | 2020/06/15/science.abc |
| | TKVEIK | | | | | | | | | 7424) |
| mAb-16 | EIVLTQSPLSLPVTLGQPASISCRSSLRL | IGHV1-69 | IGHJ6 | IGKV2-30 | IGKJ3 | 2947 | VRDSDPYTAT | 4137 | MQGTEW | Anna Wec et al., 2020 |
| | VHTDGNTYLNWFQQRPGQSPRRLIYK | (Human) | (Human) | (Human) | (Human) | | YRNNHYWYA | | PRT | (https://science.science |
| | VSNRDSGVPDRFSGSGSGTDFTLKISR | | | | | | MDV | | | mag.org/content/early/ |
| | VEAEDIGVYYCMQGTEWPRTFGQGT | | | | | | | | | 2020/06/15/science.abc |
| | KVDIK | | | | | | | | | 7424 |
| mAb-160 | DIVMTQSPGTLSLSPGERAALSCRASQ | IGHV3-11 | IGHJ4 | IGKV3-20 | IGKJ3 | 2948 | ARMGPSGSG | 4138 | HQYSGSAT | Anna Wec et al., 2020 |
| | IVTRSQLAWYQHKPGQPPRLLIYDSSS | (Human) | (Human) | (Human) | (Human) | | SLDY | | | (https://science.science |
| | RATGTPDRFSGSGSGTDFTLTISRLEPE | | | | | | | | | mag.org/content/early/ |
| | DSAVYYCHQYSGSATFGPGTKVEIK | | | | | | | | | 2020/06/15/science.abc |
| | | | | | | | | | | 7424) |

| | | | | | Not | | | | | |
|---|---|---|---|---|---|---|---|---|---|---|
| | Ab | | | Neutral- | Neutral- | | | SEQ | | SEQ |
| | or | | Doesn't | ising | ising | Protein + | | ID | | ID |
| Name | Nb | Binds to | Bind to | Vs | Vs | Epitope | Origin | NO.: | VH or VHH | NO.: |
| mAb-161 | Ab | HKU1, SARS- | 229E, | | | S; Unk | B-cells; SARS-CoV1 | 843 | EVQLVESGPTLVKPTQTLTLTCTFSGFSL | 1910 |
| | | CoV1 | NL63, | | | | Human Patient | | NTRELGVGWIRQPPGKALEWLALIYWD | |
| | | (weak), | OC43 | | | | | | DDKRYSPSLKSRLSITKDTSKNQVVLTLT | |
| | | SARS-CoV2 | | | | | | | NMDPGDTATYYCAHTSELPPRRPYAAF | |
| | | (weak) | | | | | | | DFWGQGTLVTVSS | |
| mAb-162 | Ab | HKU1 | 229E, | | | S; Unk | B-cells; SARS-CoV1 | 844 | EVQLVESGGGVVQPGGSLRLSCVASGF | 1911 |
| | | (weak), | NL63, | | | | Human Patient | | PFGRYAMHWVRQAPGQGLEWLTLISF | |
| | | SARS-CoV1 | OC43 | | | | | | DSSNIEYSDSVQGRFTISRDNSRNTLFLQ | |
| | | (weak), | | | | | | | MTSLRPEDTAVYFCARDLPPLDYWGQG | |
| | | SARS-CoV2 | | | | | | | TLVTVSS | |
| | | (weak) | | | | | | | | |
| mAb-163 | Ab | HKU1 | 229E, | | | S; Unk | B-cells; SARS-CoV1 | 845 | QVQLQQWGAGLLKPSETLSLTCAVNGG | 1912 |
| | | (weak), | OC43 | | | | Human Patient | | SFNNYYWSWIRQPPGKGPEWIGEVVHS | |
| | | NL63 | | | | | | | GSTTYNPSLKSRVTISIDMSKNQFALKLN | |
| | | (weak), | | | | | | | SVTAADTAVYYCARGFTFTYSDFLTGQRT | |
| | | SARS-CoV1 | | | | | | | FEYWGQGTLVTVSS | |
| | | (weak), | | | | | | | | |
| | | SARS-CoV2 | | | | | | | | |
| | | (weak) | | | | | | | | |
| mAb-164 | Ab | HKU1 | 229E, | | | S; Unk | B-cells; SARS-CoV1 | 846 | EVQLVESGGGVVQPGRSLRLSCAASGFT | 1913 |
| | | (weak), | OC43 | | | | Human Patient | | FSSYAMHWVRQAPGKGLEWVALISYD | |
| | | NL63 | | | | | | | GDKKYYPDSVRGRFTISRDNSKNTLHLQ | |
| | | (weak), | | | | | | | MNSLRLEDTAVYYCARSYGGSYSTVGY | |
| | | SARS-CoV1 | | | | | | | WGQGALVTVSS | |
| | | (weak), | | | | | | | | |
| | | SARS-CoV2 | | | | | | | | |
| | | (weak) | | | | | | | | |
| mAb-165 | Ab | HKU1 | 229E, | | | S; Unk | B-cells; SARS-CoV1 | 847 | QVQLVQSGGDSVNPGGSLRLSCAGSGF | 1914 |
| | | (weak), | OC43 | | | | Human Patient | | SVRDVWMSWVRQAPGKGLEWIGRIKS | |
| | | NL63 | | | | | | | EADGGSSDYRASLKDRFSIWRDASKNTL | |
| | | (weak), | | | | | | | YLQVNGLQTEDTAIYFCSWNDVGWAFT | |
| | | SARS-CoV1 | | | | | | | FWGQGTLVTVSS | |
| | | (weak), | | | | | | | | |
| | | SARS-CoV2 | | | | | | | | |
| | | (weak) | | | | | | | | |
| mAb-166 | Ab | HKU1 | 229E, | | | S; Unk | B-cells; SARS-CoV1 | 848 | QVQLVQSGAEVKKAGSSVKVSCKASGG | 1915 |
| | | (weak), | NL63, | | | | Human Patient | | PFSSFAISWVRQAPGQGLEWLGGIMTV | |
| | | SARS-CoV1 | OC43 | | | | | | FGPAHYAQKSRDRISITADESTSTSYLELS | |
| | | (weak), | | | | | | | SLTSDDTAVYYCAAEERSGTNHNYYGLD | |
| | | SARS-CoV2 | | | | | | | VWGQGTTVTVSS | |
| | | (weak) | | | | | | | | |
| mAb-167 | Ab | HKU1 | 229E, | | | S; Unk | B-cells; SARS-CoV1 | 849 | EVQLVESGGGLIQPGGSLRLSCAASGFP | 1916 |
| | | (weak), | NL63, | | | | Human Patient | | FSGTYMTWVRQAPGKGLEWVSIIYSGG | |
| | | SARS-CoV1 | OC43 | | | | | | DTYYADSVKGRFTISRDNSKNTLFLQMN | |
| | | (weak), | | | | | | | SLRVEDTAMYYCARDREMAIITERSYGL | |
| | | SARS-CoV2 | | | | | | | DVWGQGTMVTVSS | |
| | | (weak) | | | | | | | | |
| mAb-168 | Ab | HKU1 | 229E, | | | S; Unk | B-cells; SARS-CoV1 | 850 | EVQLVESGGGLVQPGGSLRLSCGASGFT | 1917 |
| | | (weak), | NL63, | | | | Human Patient | | FSDYAMSWVRQAPGKGLEWVSTISGSG | |
| | | SARS-CoV1 | OC43 | | | | | | DKTYYADSLKGRFTNSRDNSKSTLYLQM | |
| | | (weak), | | | | | | | TSLRAEDTAVYFCAKDRYCSGGSCFYDAF | |
| | | SARS-CoV2 | | | | | | | DIWGQGTTVTVSS | |
| | | (weak) | | | | | | | | |
| mAb-169 | Ab | HKU1 | 229E, | | | S; Unk | B-cells; SARS-CoV1 | 851 | EVQLVESGGGVVQPGRSLRLSCEASGFT | 1918 |
| | | (weak), | NL63, | | | | Human Patient | | FADYPMHWVRQAPGKGLEWVAVISSH | |
| | | SARS-CoV1 | OC43 | | | | | | GRSQGYAASVKGRFTFSRDNSQSSLFLQ | |
| | | (weak), | | | | | | | LNSLRVEDTAVYFCAREAQSSGRAGCLD | |
| | | SARS-CoV2 | | | | | | | AWGQGTLVTVSS | |
| | | (weak) | | | | | | | | |
| mAb-17 | Ab | SARS-CoV1, | 229E, | | | S; Unk | B-cells; SARS-CoV1 | 852 | QVQLVQSGAELKKPGSSVRVSCKAAGG | 1919 |
| | | SARS-CoV2 | HKU1, | | | | Human Patient | | TLTNYAISWVRQAPGQGFEWMGGIMP | |
| | | | NL63, | | | | | | VSHTAGYAQKFQGRVTFTADESATTAY | |
| | | | OC43 | | | | | | MDLTSLRPEDTAIYYCARDPSIHYTGNH | |
| | | | | | | | | | HWYDLDIWGQGTMVTVSS | |
| mAb-170 | Ab | HKU1 | 229E, | | | S; Unk | B-cells; SARS-CoV1 | 853 | QVQLVQSGAEVREPGSSVKLSCKTSGGT | 1920 |
| | | (weak), | NL63, | | | | Human Patient | | FSTHAISWVRQAPGQRPEWMGGIMPI | |
| | | SARS-CoV1 | OC43 | | | | | | FGESKDTQKFQGRVTFTADESTTTAYME | |
| | | (weak), | | | | | | | LRSLKSDDTAIYYCVRDSDPYTATVRSNH | |
| | | SARS-CoV2 | | | | | | | YWYAMDVWGQGTTVTVSS | |
| | | (weak) | | | | | | | | |
| mAb-171 | Ab | HKU1 | 229E, | | | S; Unk | B-cells; SARS-CoV1 | 854 | EVQLVQSGAEVKKPGSSVKVSCKVSGG | 1921 |
| | | (weak), | NL63, | | | | Human Patient | | RFSDYAISWLRQAPVKGLEWMGGIIPRL | |
| | | SARS-CoV1 | OC43 | | | | | | NRKGYSQDFQGRLTFTADESTSTAYMEL | |
| | | (weak), | | | | | | | SGLTSEDTAVYYCARDPTFLNSGNHFWY | |
| | | SARS-CoV2 | | | | | | | AVDIWGQGTTVTVSS | |
| | | (weak) | | | | | | | | |

| | | | | | | SEQ | | SEQ | | |
|---|---|---|---|---|---|---|---|---|---|---|
| | | Heavy V | Heavy J | Light V | Light J | ID | | ID | | |
| Name | VL | Gene | Gene | Gene | Gene | NO.: | CDRH3 | NO.: | CDRL3 | Sources |
| mAb-161 | SYELTQPPSVSGAPRQKVTISCSGSSAN | IGHV2-5 | IGHJ4 | IGLV1-36 | IGLJ3 | 2949 | AHTSELPPRR | 4139 | ATWDDILN | Anna Wec et al., 2020 |
| | IASNGVNWYQQLPGKAPKLLIYYDDL | (Human) | (Human) | (Human) | (Human) | | PYAAFDF | | GPV | (https://science.science |
| | VSSGVSDRFSGSKSGTSASLAISGLQSE | | | | | | | | | mag.org/content/early/ |
| | DEADYYCATWDDILNGPVFGGGTKLT | | | | | | | | | 2020/06/15/science.abc |
| | VL | | | | | | | | | 7424) |
| mAb-162 | DIRMTQSPSSLSASVGDRVTITCRASQ | IGHV3-30 | IGHJ4 | IGKV1-27 | IGKJ1 | 2950 | ARDLPPLDY | 4140 | QKYNRAP | Anna Wec et al., 2020 |
| | GFGNKVAWYQQKPGTAPKLLIYETSTL | (Human) | (Human) | (Human) | (Human) | | | | WT | (https://science.science |
| | QSGVPSRFSGSGSGTEFAFTISSLQPED | | | | | | | | | mag.org/content/early/ |
| | GATYYCQKYNRAPWTFGQGTKVEIK | | | | | | | | | 2020/06/15/science.abc |
| | | | | | | | | | | 7424) |
| mAb-163 | QSALIQPASVSGSPGQSITISCTGTSSD | IGHV4-34 | IGHJ4 | IGLV2-14 | IGLJ3 | 2951 | ARGFTFTYSD | 4141 | SSYISDIKLV | Anna Wec et al., 2020 |
| | VGRYNYVSWYQQHPGKAPKLMIYDV | (Human) | (Human) | (Human) | (Human) | | FLTGQRTFEY | | V | (https://science.science |
| | SNRPSGVSNRFSGSKSGNTASLTISGL | | | | | | | | | mag.org/content/early/ |
| | QAEDEAAYYCSSYISDIKLVVFGGGTKL | | | | | | | | | 2020/06/15/science.abc |
| | TVL | | | | | | | | | 7424) |
| mAb-164 | QSALIQPRSVSGSPGQSVTISCTGTSSD | IGHV3-30 | IGHJ4 | IGLV2-11 | IGLJ1 | 2952 | ARSYGGSYST | 4142 | CSYAGTY | Anna Wec et al., 2020 |
| | VGGSNYVSWYQQHPGKAPKLLVYDV | (Human) | (Human) | (Human) | (Human) | | VGY | | | (https://science.science |
| | TKRPSGVPDRFSGSKSGNTASLTISGL | | | | | | | | | mag.org/content/early/ |
| | QAEDEADYYCCSYAGTYIFGTGTKLTV | | | | | | | | | 2020/06/15/science.abc |
| | L | | | | | | | | | 7424) |
| mAb-165 | QSVLTQPPSVSGSPGQSVSISCSGTSS | IGHV3-15 | IGHJ4 | IGLV2-18 | IGLJ1 | 2953 | SWNDVGWA | 4143 | CSYRSDNT | Anna Wec et al., 2020 |
| | DFGNYNRISWYQQTPGTAPKVIIYEVN | (Human) | (Human) | (Human) | (Human) | | FTF | | YI | (https://science.science |
| | SRPSGVPDRFSGSKSGNTASLTITGLQ | | | | | | | | | mag.org/content/early/ |
| | AEDEADYYCCSYRSDNTYIFGGGTKVT | | | | | | | | | 2020/06/15/science.abc |
| | VL | | | | | | | | | 7424) |
| mAb-166 | ETTLTQSPLFLPVTLGQPASISCRSSQRL | IGHV1-69 | IGHJ6 | IGKV2-30 | IGKJ4 | 2954 | AAEERSGTNH | 4144 | MQGTEW | Anna Wec et al., 2020 |
| | VHTNGNTYLNWFQQRPGHSPRRLIY | (Human) | (Human) | (Human) | (Human) | | NYYGLDV | | PRT | (https://science.science |
| | QVSNRDSGVPDRFSGSGSGTDFTLKIS | | | | | | | | | mag.org/content/early/ |
| | RVEAEDVGVYYCMQGTEWPRTFGG | | | | | | | | | 2020/06/15/science.abc |
| | GTKLEIK | | | | | | | | | 7424) |
| mAb-167 | QPVLTQPPSASGTPGQRVTISCSGGSS | IGHV3-53 | IGHJ3 | IGLV1-44 | IGLJ1 | 2955 | ARDREMAIIT | 4145 | AAWDDSL | Anna Wec et al., 2020 |
| | NIGSNSVNWYQQLPGTAPKLLIYSNSQ | (Human) | (Human) | (Human) | (Human) | | ERSYGLDV | | NTFRYV | (https://science.science |
| | RPSGVPDRFSGSKSGTSASLAISGLQSE | | | | | | | | | mag.org/content/early/ |
| | DEADYYCAAWDDSLNTFRYVFGTGTK | | | | | | | | | 2020/06/15/science.abc |
| | VTVL | | | | | | | | | 7424) |
| mAb-168 | ETTLTQSPSSLSASVGDRVNITCRASQS | IGHV3-23 | IGHJ3 | IGKV1-39 | IGKJ3 | 2956 | AKDRYCSGGS | 4146 | QQSYNTFF | Anna Wec et al., 2020 |
| | ISTYLTWYQQKPGKAPKLLIYGASSLHS | (Human) | (Human) | (Human) | (Human) | | CFYDAFDI | | T | (https://science.science |
| | GVPSRFTGVGSGTEFTLSISSLQPEDFA | | | | | | | | | mag.org/content/early/ |
| | TYYCQQSYNTFFTFGGGTKVDIK | | | | | | | | | 2020/06/15/science.abc |
| | | | | | | | | | | 7424) |
| mAb-169 | DIRLTQSPSSLSASVGDRVTITCRASQA | IGHV3-30 | IGHJ4 | IGKV1D- | IGKJ5 | 2957 | AREAQSSGRA | 4147 | QHYDSYPT | Anna Wec et al., 2020 |
| | IAGWLAWYQQKPGRAPKSLIYRASSL | (Human) | (Human) | 16 | (Human) | | GCLDA | | A | (https://science.science |
| | QSGVPSRFSGSGSGTDFSLTISNLQPE | | | (Human) | | | | | | mag.org/content/early/ |
| | DSATYYCQHYDSYPTAFGQGTRLEIK | | | | | | | | | 2020/06/15/science.abc |
| | | | | | | | | | | 7424) |
| mAb-17 | ETGLTQIPFSLPVTFGQPASISCRFSQR | IGHV1-69 | IGHJ3 | IGKV2-30 | IGKJ1 | 2958 | ARDPSIHYTG | 4148 | MQGTEWL | 2020/06/15/science.abc |
| | LVHTDGNTNLNWFLQRPGQFPRGLIY | (Human) | (Human) | (Human) | (Human) | | NHHWYDLDI | | GT | Anna Wec et al., 2020 |
| | KVFNRDSGVPDRFRGSGSGIDFTLKIS | | | | | | | | | (https://science.science |
| | RVEVEDVGIYYGMQGTEWLGTFGQG | | | | | | | | | mag.org/content/early/ |
| | TKVEIK | | | | | | | | | 7424) |
| mAb-170 | ETTLTQSPLSLAVTLGQPASISCRSSLGL | IGHV1-69 | IGHJ6 | IGKV2-30 | IGKJ1 | 2959 | VRDSDPYTAT | 4149 | MQGTEW | Anna Wec et al., 2020 |
| | VHTNGNTYLNWFQQRPGQSPRRLIYR | (Human) | (Human) | (Human) | (Human) | | VRSNHYWYA | | PRT | (https://science.science |
| | VSNRDSGVPDRFSGSGSVTDFTLTISR | | | | | | MDV | | | mag.org/content/early/ |
| | VEAEDIGVYYCMQGTEWPRTFGQGT | | | | | | | | | 2020/06/15/science.abc |
| | KVEIK | | | | | | | | | 7424) |
| mAb-171 | ETTLTQSPLSLSVTLGQAASISCTCSQT | IGHV1-69 | IGHJ6 | IGKV2-30 | IGKJ3 | 2960 | ARDPTFLNSG | 4150 | MQTTDWP | Anna Wec et al., 2020 |
| | AVHSDGNTYLNWFHQRPGQSPRRLIY | (Human) | (Human) | (Human) | (Human) | | NHFWYAVDI | | RT | (https://science.science |
| | KVSNRDSGVPDRFSGSGSGTDFTLKIS | | | | | | | | | mag.org/content/early/ |
| | RVEAEDVGIYYCMQTTDWPRTFGQG | | | | | | | | | 2020/06/15/science.abc |
| | TKVDIK | | | | | | | | | 7424) |

| | | | | | Not | | | | | |
|---|---|---|---|---|---|---|---|---|---|---|
| | Ab | | | Neutral- | Neutral- | | | SEQ | | SEQ |
| | or | | Doesn't | ising | ising | Protein + | | ID | | ID |
| Name | Nb | Binds to | Bind to | Vs | Vs | Epitope | Origin | NO.: | VH or VHH | NO.: |
| mAb-172 | Ab | HKU1 | 229E, | | | S; Unk | B-cells; SARS-CoV1 | 855 | QVQLQESGRGLVKPSETLSLTCTVSGGSI | 1922 |
| | | (weak), | NL63, | | | | Human Patient | | TSSRYYWGWIRQPPGRNLEWIGSIHYS | |
| | | SARS-CoV1 | OC43 | | | | | | GTTSYNPSLWSRVAISVDTAQNQFSLRL | |
| | | (weak), | | | | | | | NSVTAADTAVYYCAAPAPSNHESWSGT | |
| | | SARS-CoV2 | | | | | | | DWFDPWGQGILVTVSS | |
| | | (weak) | | | | | | | | |
| mAb-173 | Ab | HKU1 | 229E, | | | S; Unk | B-cells; SARS-CoV1 | 856 | QVQLVQSGAEVKGPGASVKVSCKVSGY | 1923 |
| | | (weak), | NL63, | | | | Human Patient | | SFITYDITWVRQAPGQGLEWMGWISTK | |
| | | SARS-CoV1 | OC43 | | | | | | SGDTRYAQNVQGRVTMTTDTSTNTAY | |
| | | (weak), | | | | | | | MELRNLKSDDTALYYCARTTPRGWEQ | |
| | | SARS-CoV2 | | | | | | | WPVLEYWGQGTLVTVSS | |
| | | (weak) | | | | | | | | |
| mAb-174 | Ab | HKU1 | 229E, | | | S; Unk | B-cells; SARS-CoV1 | 857 | EVQLVESGGGLVQPGGSLRLSCEASGEN | 1924 |
| | | (weak), | NL63, | | | | Human Patient | | FNSYSMSWVRQAPGKGLEWLSYISSRSS | |
| | | SARS-CoV1 | OC43 | | | | | | TIKYASSVQGRFTVSRDNAKKSVYLQMN | |
| | | (weak), | | | | | | | SLRDEDTAVYFCARELDSETYYNYNSLDV | |
| | | SARS-CoV2 | | | | | | | WGQGTTVTVSS | |
| | | (weak) | | | | | | | | |
| mAb-175 | Ab | HKU1 | 229E, | | | S; Unk | B-cells; SARS-CoV1 | 858 | QVQLVESGGEVKKPGASVKVSCKASGY | 1925 |
| | | (weak), | NL63, | | | | Human Patient | | TLSSYPISWVRQAPGHGLEWMGWINT | |
| | | SARS-CoV1 | OC43 | | | | | | YNGRTNYEQMLQGRVTMTTDTSTSTAY | |
| | | (weak), | | | | | | | MELRSLRSDDTAVYYCARVVFRHGQYD | |
| | | SARS-CoV2 | | | | | | | DSSGRLAFDIWGQGTMVTVSS | |
| | | (weak) | | | | | | | | |
| mAb-176 | Ab | HKU1 | 229E, | | | S; Unk | B-cells; SARS-CoV1 | 859 | QVQLVQSGAELKKPGSSVRVSCKAAGG | 1926 |
| | | (weak), | NL63, | | | | Human Patient | | TLTNYAISWVRQAPGQGFEWMGGIMP | |
| | | SARS-CoV1 | OC43 | | | | | | VSHTAGYAQKFQGRVTFTADESATTAY | |
| | | (weak), | | | | | | | MDLTSLRPEDTAIYYCARDPSIHYTGNH | |
| | | SARS-CoV2 | | | | | | | HWYDLDIWGQGTMVTVSS | |
| | | (weak) | | | | | | | | |
| mAb-177 | Ab | HKU1 | 229E, | | | S; Unk | B-cells; SARS-CoV1 | 860 | EVQLLESGAEVKKPGSSVKVSCKTSGGT | 1927 |
| | | (weak), | NL63, | | | | Human Patient | | FSTHAISWVRQAPGQGPEWMGGIIPLF | |
| | | SARS-CoV1 | OC43 | | | | | | GTSEHAQRFQARVKFTADESTSTAYMEL | |
| | | (weak), | | | | | | | SSLTPEDTAVYYCVRDSDPYTATSRNNH | |
| | | SARS-CoV2 | | | | | | | YWYGMDVWGQGTTVTVSS | |
| | | (weak) | | | | | | | | |
| mAb-178 | Ab | SARS-CoV1 | 229E, | | | S; Unk | B-cells; SARS-CoV1 | 861 | EVQLLESGGGVVQPGTSLRLSCAVSGF | 1928 |
| | | (weak), | HKU1, | | | | Human Patient | | MFKNYAIHWVRQAPGKGLEWVAVISF | |
| | | SARS-CoV2 | NL63, | | | | | | DGSDISYTESVQGRFTISRDNSENMLYL | |
| | | (weak) | OC43 | | | | | | QMNSLRAEDTAMYYCAREPDGIGAAGI | |
| | | | | | | | | | SGYWGQGTLVTVSS | |
| mAb-179 | Ab | SARS-CoV1 | 229E, | | | S; Unk | B-cells; SARS-CoV1 | 862 | EVQLVESGGGLVKPGGSLRLSCVASGFT | 1929 |
| | | (weak), | HKU1, | | | | Human Patient | | FSDFYMSWIRQAPGKGLEWVSYISGSG | |
| | | SARS-CoV2 | NL63, | | | | | | DTIYYADSVKGRFTVSRDNAKNSLFLQM | |
| | | (weak) | OC43 | | | | | | SSLGAEDTAMYYCAREMATSFGYYFVLD | |
| | | | | | | | | | VWGQGTTVTVSS | |
| mAb-18 | Ab | SARS-CoV1, | 229E, | | | S; Unk | B-cells; SARS-CoV1 | 863 | QVQLQQWGAGLLKPSETLSLSCAVYGG | 1930 |
| | | SARS-CoV2 | HKU1, | | | | Human Patient | | SFSGFYWSWIRQPPGKGLEWIGEINHS | |
| | | | NL63, | | | | | | GSANYNPSLMSRVTISMDTSKKQFSLQL | |
| | | | OC43 | | | | | | RSVTAADTAVYYCARGQESPIVGVTGR | |
| | | | | | | | | | WFDPWGQGTLVTVSS | |
| mAb-180 | Ab | SARS-CoV1 | 229E, | | | S; Unk | B-cells; SARS-CoV1 | 864 | EVQLVESGGGVVQPGRSLRLSCAASEFT | 1931 |
| | | (weak), | HKU1, | | | | Human Patient | | FSTYAMHWVRQAPGKGLEWVALISYD | |
| | | SARS-CoV2 | NL63, | | | | | | GINKYYADSVKGRFAISRDNSKNTLYLQV | |
| | | (weak) | OC43 | | | | | | NSLRADDTAVYYCVRPYSGSYTNWFDL | |
| | | | | | | | | | WGQGTLVTVSS | |
| mAb-181 | Ab | SARS-CoV1 | 229E, | | | S; Unk | B-cells; SARS-CoV1 | 865 | QVQLVQSGAEVKKPGSSVKVSCKASGG | 1932 |
| | | (weak), | HKU1, | | | | Human Patient | | MLSDYAISWVRQAPGQRLEWMGGIM | |
| | | SARS-CoV2 | NL63, | | | | | | PAFGSPGYAQIFRGRATISADVSTSTAYL | |
| | | (weak) | OC43 | | | | | | ELTSLKPEDTAVYYCARDPSILNTGNHH | |
| | | | | | | | | | WYDLDIWGQGTMVTVSS | |
| mAb-182 | Ab | 229 | NL63, | | | S; Unk | B-cells; SARS-CoV1 | 866 | QVQLVQSGAEVKMPGSSVKVSCKVSG | 1933 |
| | | (weak), | OC43, | | | | Human Patient | | GRFSDYAISWLRQAPLEGLEWMGGIVP | |
| | | HKU1 | SARS- | | | | | | HLNRKGYSQKFQDRLTFTADDSTSTAYM | |
| | | (weak), | CoV1 | | | | | | ELSGLTSEDTAVYYCARDPTFLNTGNHF | |
| | | SARS-CoV2 | | | | | | | WYAVDIWGQGTTVTVSS | |
| | | (weak) | | | | | | | | |
| mAb-183 | Ab | HKU1, SARS- | 229E, | | | S; Unk | B-cells; SARS-CoV1 | 867 | QVQLVQSGAEVKKPGSSVKVSCKASGG | 1934 |
| | | CoV2 (weak) | NL63, | | | | Human Patient | | TFSTHAISWVRQAPGHGPEWLGGILPLF | |
| | | | OC43, | | | | | | GTSESAQRFQARVKITADESTSTAYMELS | |
| | | | SARS- | | | | | | SLTSEDTAVYYCVRDSDPYTATSRNNHY | |
| | | | Cov1 | | | | | | WYAMDVWGQGTTVTVSS | |

| | | | | | | SEQ | | SEQ | | |
|---|---|---|---|---|---|---|---|---|---|---|
| | | Heavy V | Heavy J | Light V | Light J | ID | | ID | | |
| Name | VL | Gene | Gene | Gene | Gene | NO.: | CDRH3 | NO.: | CDRL3 | Sources |
| mAb-172 | EIVMTQSPASLSASVGDRVTITCRAGQ | IGHV4-39 | IGHJ5 | IGKV1-39 | IGKJ3 | 2961 | AAPAPSNHES | 4151 | QQSYSTPP | Anna Wec et al., 2020 |
| | SISTNLCWYQQRQGKAPKLLIYAASSL | (Human) | (Human) | (Human) | (Human) | | WSGTDWFDP | | T | (https://science.science |
| | RSGVPSRFSGSGSGTDFTLTISSLQPED | | | | | | | | | mag.org/content/early/ |
| | FATYYCQQSYSTPPTFGGGTKVDIK | | | | | | | | | 2020/06/15/science.abc |
| | | | | | | | | | | 7424) |
| mAb-173 | DIQVTQSPATLSVSPGERVTLSCRASQ | IGHV1-18 | IGHJ4 | IGKV3-15 | IGKJ4 | 2962 | ARTTPRGWE | 4152 | HQYNKWP | Anna Wec et al., 2020 |
| | SISNTLAWYQQKPGQAPRLLIYGASTR | (Human) | (Human) | (Human) | (Human) | | QWPVLEY | | PIT | (https://science.science |
| | ATGIPARFSGSGSGTEFTLTISSLQSEDF | | | | | | | | | mag.org/content/early/ |
| | AVYYCHQYNKWPPITFGGGTKVEIK | | | | | | | | | 2020/06/15/science.abc |
| | | | | | | | | | | 7424) |
| mAb-174 | DIQMTQSPSSLSASVGDRVTISCRASQ | IGHV3-48 | IGHJ6 | IGKV1-16 | IGKJ2 | 2963 | ARELDSETYY | 4153 | KQYNSYPY | Anna Wec et al., 2020 |
| | GISTFLAWFQQRPGKAPKSLIYAASKL | (Human) | (Human) | (Human) | (Human) | | NYNSLDV | | T | (https://science.science |
| | QSGVPSRFSGSDSGPDFTLTIDNLRPE | | | | | | | | | mag.org/content/early/ |
| | DSATYYCKQYNSYPYTFGQGTKLEIK | | | | | | | | | 2020/06/15/science.abc |
| | | | | | | | | | | 7424) |
| mAb-175 | EIVMTQSPSSLSASVGDSVTITCRASQS | IGHV1-18 | IGHJ3 | IGKV1-39 | IGKJ1 | 2964 | ARVVFRHGQ | 4154 | QQSYSDS | Anna Wec et al., 2020 |
| | ISNYLNWYQDKPGKAPELLIYAASNLQ | (Human) | (Human) | (Human) | (Human) | | YDDSSGRLAF | | WT | (https://science.science |
| | SGVPSRFSGSGSGTDFTLTISSLQPEDF | | | | | | DI | | | mag.org/content/early/ |
| | ATYYCQQSYSDSWTFGQGTKVDIK | | | | | | | | | 2020/06/15/science.abc |
| | | | | | | | | | | 7424) |
| mAb-176 | ETTLTQSPLSLPVTLGQPASISCRSSQRI | IGHV1-69 | IGHJ3 | IGKV2-30 | IGKJ1 | 2965 | ARDPSIHYTG | 4155 | MQGTEW | Anna Wec et al., 2020 |
| | VHTDGNTYLNWFLQRPGQSPRRLIYK | (Human) | (Human) | (Human) | (Human) | | NHHWYDLDI | | PRT | (https://science.science |
| | VSNRDSGVPDRFSGSGSGTDFTLKISR | | | | | | | | | mag.org/content/early/ |
| | VEAEDVGIYYCMQGTEWPRTFGQGT | | | | | | | | | 2020/06/15/science.abc |
| | KVEIK | | | | | | | | | 7424) |
| mAb-177 | DIQMTQSPLSLPVTLGQPASISCRSSQS | IGHV1-69 | IGHJ6 | IGKV2-30 | IGKJ3 | 2966 | VRDSDPYTAT | 4156 | MQGTDW | Anna Wec et al., 2020 |
| | VVHSDGNTYLNWFHQRPGQSPRRLIY | (Human) | (Human) | (Human) | (Human) | | SRNNHYWYG | | PRT | (https://science.science |
| | KVSNRDSGVPDRFSGSGSGTDFTLKIS | | | | | | MDV | | | mag.org/content/early/ |
| | RVEAEDIGVYYCMQGTDWPRTFGQG | | | | | | | | | 2020/06/15/science.abc |
| | TKVDIK | | | | | | | | | 7424) |
| mAb-178 | GIVLTQSPDSLAVSVGERATINCKSSQT | IGHV3-30 | IGHJ4 | IGKV4-1 | IGKJ3 | 2967 | AREPDGIGAA | 4157 | QQYYTTPY | Anna Wec et al., 2020 |
| | VLYSSKNKHYLAWYQQKPGQPPKLLT | (Human) | (Human) | (Human) | (Human) | | GISGY | | T | (https://science.science |
| | SSPSTREPGVPDRFSGSGSGTDFTLTIS | | | | | | | | | mag.org/content/early/ |
| | SLQAEDVAVYYCQQYYTTPYTFGQGT | | | | | | | | | 2020/06/15/science.abc |
| | KVDIK | | | | | | | | | 7424) |
| mAb-179 | EIVMTQTPSSLSASVGDRVTITCRASQ | IGHV3-11 | IGHJ6 | IGKV1-39 | IGKJ3 | 2968 | AREMATSFGY | 4158 | QQTYSTPP | Anna Wec et al., 2020 |
| | SISNYVNWYQQKPGRAPNLLIYAASSL | (Human) | (Human) | (Human) | (Human) | | YFVLDV | | EGPT | (https://science.science |
| | QSGVSSRFSGSGSGTDFTLTISSLQPED | | | | | | | | | mag.org/content/early/ |
| | FATYYCQQTYSTPPEGPTFGPGTKVEIK | | | | | | | | | 2020/06/15/science.abc |
| | | | | | | | | | | 7424) |
| mAb-18 | QPVLTQPASVSGSPGQSVTISCTGTSS | IGHV4-34 | IGHJ5 | IGLV2-23 | IGLJ3 | 2969 | ARGQESPIVG | 4159 | CSYAGASP | Anna Wec et al., 2020 |
| | DVGSYSDVGNYVSWYQHHPGKAPKL | (Human) | (Human) | (Human) | (Human) | | VTGRWFDP | | FVV | (https://science.science |
| | MIYEVRTRPSWVSTRFSGSKSGTTASL | | | | | | | | | mag.org/content/early/ |
| | TISGLQAEDEADYYCCSYAGASPFVVF | | | | | | | | | 2020/06/15/science.abc |
| | GGGTKLTVL | | | | | | | | | 7424) |
| mAb-180 | EIVMTQSPGTLSSSPGERATLSCRASQ | IGHV3-30 | IGHJ4 | IGKV3-20 | IGKJ2 | 2970 | VRPYSGSYTN | 4160 | QQYGSSYT | Anna Wec et al., 2020 |
| | SVSSRYLAWYQQKPGQAPRLLIYGTSN | (Human) | (Human) | (Human) | (Human) | | WFDL | | | (https://science.science |
| | RATGIPDRFSGSGSGTDFTLTISRLEPE | | | | | | | | | mag.org/content/early/ |
| | DFAVYYCQQYGSSYTFGPGTKLEIK | | | | | | | | | 2020/06/15/science.abc |
| | | | | | | | | | | 7424) |
| mAb-181 | DIVMTQSPLSLPVGLGQSASISCRSSQ | IGHV1-69 | IGHJ3 | IGKV2-30 | IGKJ1 | 2971 | ARDPSILNTG | 4161 | MQATEWP | Anna Wec et al., 2020 |
| | RVVHTDGNTYLNWFHQRPGQSPRRLI | (Human) | (Human) | (Human) | (Human) | | NHHWYDLDI | | RT | (https://science.science |
| | YKVSNRDSGVPDRFSGSGSGTDFTLRI | | | | | | | | | mag.org/content/early/ |
| | SRVEAEDVGVYYCMQATEWPRTFGQ | | | | | | | | | 2020/06/15/science.abc |
| | GTKVEIK | | | | | | | | | 7424) |
| mAb-182 | DIRLTQSPLSLSVTLGQAASISCTCSQSA | IGHV1-69 | IGHJ6 | IGKV2-30 | IGKJ1 | 2972 | ARDPTFLNTG | 4162 | MQTTDWP | Anna Wec et al., 2020 |
| | VHSDGTTYFNWFHQRPGQSPRRLIYK | (Human) | (Human) | (Human) | (Human) | | NHFWYAVDI | | RT | (https://science.science |
| | VSNRDSGVPDRFIGSGSGTHFTLKISR | | | | | | | | | mag.org/content/early/ |
| | VEAEDVGVYYCMQTTDWPRTFGQGT | | | | | | | | | 2020/06/15/science.abc |
| | KVEIK | | | | | | | | | 7424) |
| mAb-183 | ETTLTQSPLSLPVTLGQPASISCRSSQS | IGHV1-69 | IGHJ6 | IGKV2-30 | IGKJ1 | 2973 | VRDSDPYTAT | 4163 | MQGTDW | Anna Wec et al., 2020 |
| | VVHSDGNTYLNWFHQRPGQSPRRLIY | (Human) | (Human) | (Human) | (Human) | | SRNNHYWYA | | PRT | (https://science.science |
| | KVSNRDSGVPDRFSGSGSGTDFTLKIS | | | | | | MDV | | | mag.org/content/early/ |
| | RVEAEDIGVYYCMQGTDWPRTFGQG | | | | | | | | | 2020/06/15/science.abc |
| | TKVEIK | | | | | | | | | 7424) |

| | | | | | Not | | | | | |
|---|---|---|---|---|---|---|---|---|---|---|
| | Ab | | | Neutral- | Neutral- | | | SEQ | | SEQ |
| | or | | Doesn't | ising | ising | Protein + | | ID | | ID |
| Name | Nb | Binds to | Bind to | Vs | Vs | Epitope | Origin | NO.: | VH or VHH | NO.: |
| mAb-184 | Ab | HKU1 | 229E, | | | S; Unk | B-cells; SARS-CoV1 | 868 | QVQLVQSGAEVKKPGSSVKVSCKVSGG | 1935 |
| | | (weak), | NL63, | | | | Human Patient | | TFSNYAISWLRQAPGQGPEWMGGIIPA | |
| | | SARS-CoV2 | OC43, | | | | | | LSRVGYVRKFQARLTISADELTTTAYMDL | |
| | | (weak) | SARS- | | | | | | SSLTSEDTAVYYCARDPSFLNTGNHFWY | |
| | | | CoV1 | | | | | | DFDLWGQGTTVTVSS | |
| mAb-185 | Ab | SARS-CoV2 | 229E, | | | S; Unk | B-cells; SARS-CoV1 | 869 | QVQLQQWGAGLLKPSETLSLTCAVYGG | 1936 |
| | | (weak) | HKU1, | | | | Human Patient | | SFSGFYWTWIRQPPGKGLEWIGEINHS | |
| | | | NL63, | | | | | | GSSNYDLSLKSRVTMSVDTSKNQFSLKLS | |
| | | | OC43, | | | | | | SVTAADTAVYYCARGMISPRIPRTTRQR | |
| | | | SARS- | | | | | | WFDTWGQGTLVTVSS | |
| | | | CoV1 | | | | | | | |
| mAb-186 | Ab | SARS-CoV2 | 229E, | | | S; Unk | B-cells; SARS-CoV1 | 870 | QVQLQQWGAGLLKPSETLSLTCGVYGG | 1937 |
| | | (weak) | HKU1, | | | | Human Patient | | SFSGYFWSWIRQSPGKGLEWIGEINHSR | |
| | | | NL63, | | | | | | SMSYNPSLKSRITMSVDTSKNQFSLNLN | |
| | | | OC43, | | | | | | SVTAADTAVYFCARGKAHRNDFWSGYY | |
| | | | SARS- | | | | | | PHWFDPWGQGILVTVSS | |
| | | | CoV1 | | | | | | | |
| mAb-187 | Ab | SARS-CoV2 | 229E, | | | S; Unk | B-cells; SARS-CoV1 | 871 | QVQLVQSGAEVKKPGSSVKISCKISGDTF | 1938 |
| | | (weak) | HKU1, | | | | Human Patient | | STNAISWLRQAPGREPEWMGGIVPLVG | |
| | | | NL63, | | | | | | PASYAQRPQGRLTITADEFTNTAYLELNS | |
| | | | OC43, | | | | | | LRSEDTATYYCARDSDPYTATRRHNHYW | |
| | | | SARS- | | | | | | YAMDVWGQGTTVTVSS | |
| | | | CoV1 | | | | | | | |
| mAb-188 | Ab | SARS-CoV2 | 229E, | | | S; Unk | B-cells; SARS-CoV1 | 872 | EVQLLESGPGLVKPSETLSLTCTVSGGSI | 1939 |
| | | (weak) | HKU1, | | | | Human Patient | | NSQYWNWIRQSPGKGLEWIGYVYYSGS | |
| | | | NL63, | | | | | | TNYNPSLKSRVTMSVDTSKNHFSLNLRS | |
| | | | OC43, | | | | | | VTAADTAVYYCARGLVVRYFDGFPSGPII | |
| | | | SARS- | | | | | | GAFDIWNQGTTVTVSS | |
| | | | CoV1 | | | | | | | |
| mAb-189 | Ab | SARS-CoV2 | 229E, | | | S; Unk | B-cells; SARS-CoV1 | 873 | QVQLVQSGAEVKKPGSSVKVSCKVSGG | 1940 |
| | | (weak) | HKU1, | | | | Human Patient | | TFSSHAISWVRQAPGQRPEWMGGIMP | |
| | | | NL63, | | | | | | IFGESKDTQKFQGRVTFTVDESTNTAYM | |
| | | | OC43, | | | | | | ELTSLKSEDTAIYYCVRDPDPYTATVRHN | |
| | | | SARS- | | | | | | HYWHGMDVWGQGTTVTVSS | |
| | | | CoV1 | | | | | | | |
| mAb-19 | Ab | OC43, SARS- | 229E, | | | S; Unk | B-cells; SARS-CoV1 | 874 | QVQLQQWGAGLLKPSETLSLTCAVYGG | 1941 |
| | | CoV1, SARS- | HKU1, | | | | Human Patient | | SFSGFHWSWIRQPPGKGLEWIGEVNHS | |
| | | CoV2 | NL63 | | | | | | GSTKYNPSLKSRVTVSVDTSKNQFSLRLS | |
| | | | | | | | | | SVTAADTAIYYCARGSLSREYDFLTAPQN | |
| | | | | | | | | | GPWFDSWGQGALVTVSS | |
| mAb-190 | Ab | SARS-CoV2 | 229E, | | | S; Unk | B-cells; SARS-CoV1 | 875 | EVQLLESGPGLVKPSETLSLTCTVSGGSIS | 1942 |
| | | (weak) | HKU1, | | | | Human Patient | | SNNLYWGWIRQPPGKGLEWIGSIYYSG | |
| | | | NL63, | | | | | | STYYNPSLKSRVIIPVDTSKDQFSLRLSSV | |
| | | | OC43, | | | | | | TAADTAVYYCARHSQKDIVLIPAAQSPIF | |
| | | | SARS- | | | | | | DYWGQGTLVTVSS | |
| | | | CoV1 | | | | | | | |
| mAb-191 | Ab | SARS-CoV2 | 229E, | | | S; Unk | B-cells; SARS-CoV1 | 876 | EVQLVESGGGLVQPGGSLRLSCSASGFT | 1943 |
| | | (weak) | HKU1, | | | | Human Patient | | FSRYAMHWVRQAPGKGLEYVSAINLNG | |
| | | | NL63, | | | | | | DSTYYTDSVRGRFTISRDNSKNTLFLQMS | |
| | | | OC43, | | | | | | NVRPEDTAFYYCVKDGGYYDSSGPGHW | |
| | | | SARS- | | | | | | GQGTLVTVSS | |
| | | | CoV1 | | | | | | | |
| mAb-192 | Ab | SARS-CoV2 | 229E, | | | S; Unk | B-cells; SARS-CoV1 | 877 | QVQLVQSGGGVVQPGGSLRLSCADSG | 1944 |
| | | (weak) | HKU1, | | | | Human Patient | | NAFIANPMHWVRQAPGKGLEWLALIST | |
| | | | NL63, | | | | | | DGNNRHYADSVKGRFTFSRDNSKNSLYL | |
| | | | OC43, | | | | | | QMDSLRPEDTGVYYCARESRSSGRAGC | |
| | | | SARS- | | | | | | FDSWGQGTLVTVSS | |
| mAb-193 | Ab | SARS-CoV2 | 229E, | | | S; Unk | B-cells; SARS-CoV1 | 878 | QVQLVESGGGVVQPGTSLRLSCAATGF | 1945 |
| | | (weak) | HKU1, | | | | Human Patient | | TFTTYPMHWVRQAPGKGLEWVAVISY | |
| | | | NL63, | | | | | | DGMNQYYADFLKGRFTISRDNSKNTLYL | |
| | | | OC43, | | | | | | QMNSLRADDTAVYYCARAYGGNYQNH | |
| | | | SARS- | | | | | | FDHWGQGTLVTVSS | |
| | | | CoV1 | | | | | | | |
| mAb-194 | Ab | SARS-CoV2 | 229E, | | | S; Unk | B-cells; SARS-CoV1 | 879 | EVQLVQWGAGLLKPSETLSLRCAVYGGS | 1946 |
| | | (weak) | HKU1, | | | | Human Patient | | FNGFYWTWIRQAPGQGLEWIAEINHSG | |
| | | | NL63, | | | | | | TTNYNPSLKSRVTISIDTSKKQFSLSLKSVT | |
| | | | OC43, | | | | | | AADTAMYFCARGTISPIVGVPTPVVPRR | |
| | | | SARS- | | | | | | GRSWFDPWGQGTLVTVSS | |
| | | | CoV1 | | | | | | | |
| mAb-195 | Ab | SARS-CoV2 | 229E, | | | S; Unk | B-cells; SARS-CoV1 | 880 | QVQLVQSGAEVKKPGSSVKVSCKASGG | 1947 |
| | | (weak) | HKU1, | | | | Human Patient | | TFSTHAISWVRQAPGHGPEWLGGIIPLF | |
| | | | NL63, | | | | | | GTSESAQRFQARVKITADESTSTAYMELS | |
| | | | OC43, | | | | | | SLTSEDTAVYYCVRDSDPYTATSRNNHY | |
| | | | SARS- | | | | | | WYAMDVWGQGTTVTVSS | |
| | | | CoV1 | | | | | | | |

| | | | | | | SEQ | | SEQ | | |
|---|---|---|---|---|---|---|---|---|---|---|
| | | Heavy V | Heavy J | Light V | Light J | ID | | ID | | |
| Name | VL | Gene | Gene | Gene | Gene | NO.: | CDRH3 | NO.: | CDRL3 | Sources |
| mAb-184 | ETTLTQSPLSLPVTLGQPASISCTSSQTV | IGHV1-69 | IGHJ4 | IGKV2-30 | IGKJ2 | 2974 | ARDPSFLNTG | 4164 | MQGTEW | Anna Wec et al., 2020 |
| | VHTDRNTYLNWYHQRPGQSPRRLIYK | (Human) | (Human) | (Human) | (Human) | | NHFWYDFDL | | PRT | (https://science.science |
| | VSNRDSGVPDRFSGSGSGSHFTLKISR | | | | | | | | | mag.org/content/early/ |
| | VEAEDVGVYYCMQGTEWPRTFGQGT | | | | | | | | | 2020/06/15/science.abc |
| | KLEIK | | | | | | | | | 7424) |
| mAb-185 | QPGLTQPASVSGSPGQSITISCTGTSG | IGHV4-34 | IGHJ4 | IGLV2-23 | IGLJ3 | 2975 | ARGMISPRIP | 4165 | CSYAGDDT | Anna Wec et al., 2020 |
| | DVGSDNLVSWYQRHPGKAPKLMIYE | (Human) | (Human) | (Human) | (Human) | | RTTRQRWFD | | VV | (https://science.science |
| | GSKRPSGVSHRFSGSNSGNTASLTISG | | | | | | T | | | mag.org/content/early/ |
| | LQAEDDADYYCCSYAGDDTVVFGGGT | | | | | | | | | 2020/06/15/science.abc |
| | KLTVL | | | | | | | | | 7424) |
| mAb-186 | DIVLTQSPGTLSLSPGERVTLSCRASQSI | IGHV4-34 | IGHJ5 | IGKV3-20 | IGKJ1 | 2976 | ARGKAHRND | 4166 | HQYGGSPT | Anna Wec et al., 2020 |
| | SSNYLAWYQQKPGQAPRLLISDASSRA | (Human) | (Human) | (Human) | (Human) | | FWSGYYPHW | | T | (https://science.science |
| | TGIPDRFSGSGSGADFTLIISRLEPEDFA | | | | | | FDP | | | mag.org/content/early/ |
| | VYFCHQYGGSPTTFGQGTKVEIK | | | | | | | | | 2020/06/15/science.abc |
| | | | | | | | | | | 7424) |
| mAb-187 | ETTLTQSPLSLPVTLGQPASISCRSSQIA | IGHV1-69 | IGHJ6 | IGKV2-30 | IGKJ1 | 2977 | ARDSDPYTAT | 4167 | MQGTDW | Anna Wec et al., 2020 |
| | MHSDGNTYLSWFHQRPGQPPRRLIYK | (Human) | (Human) | (Human) | (Human) | | RRHNHYWYA | | PRT | (https://science.science |
| | ISNRDSGVPDRFSGSGSGTDFTLKISRV | | | | | | MDV | | | mag.org/content/early/ |
| | EAEDIGTFYCMQGTDWPRTFGQGTK | | | | | | | | | 2020/06/15/science.abc |
| | VEIK | | | | | | | | | 7424) |
| mAb-188 | ETTLTQSPATLSLSPGERATLSCRASQS | IGHV4-59 | IGHJ3 | IGKV3-11 | IGKJ4 | 2978 | ARGLVVRYFD | 4168 | QQRTSTLT | Anna Wec et al., 2020 |
| | VSSYLAWYQQKPGQAPRLLIYDAFNR | (Human) | (Human) | (Human) | (Human) | | GFPSGPIIGAF | | | (https://science.science |
| | ATGVPARFSGSGSGTDFTLTISSLEPED | | | | | | DI | | | mag.org/content/early/ |
| | FAVYYCQQRTSTLTFGGGTKVDIK | | | | | | | | | 2020/06/15/science.abc |
| | | | | | | | | | | 7424) |
| mAb-189 | ETTLTQSPLSLPVTLGQAASISCRSSQA | IGHV1-69 | IGHJ6 | IGKV2-30 | IGKJ1 | 2979 | VRDPDPYTAT | 4169 | MQGTEW | Anna Wec et al., 2020 |
| | VVHSDGNTYLNWFQQRPGQPPRRLIY | (Human) | (Human) | (Human) | (Human) | | VRHNHYWH | | PRT | (https://science.science |
| | KVSNRDSGVPDRFSGSGSGTVFTLKIS | | | | | | GMDV | | | mag.org/content/early/ |
| | RVEAEDIGVYYCMQGTEWPRTFGQG | | | | | | | | | 2020/06/15/science.abc |
| | TKVEIK | | | | | | | | | 7424) |
| mAb-19 | QSVLTQPPSVSAAPGQKVTISCSGSSS | IGHV4-34 | IGHJ5 | IGLV1-51 | IGLJ3 | 2980 | ARGSLSREYD | 4170 | ETWDSSLS | Anna Wec et al., 2020 |
| | NLGNNYVSWYQQLPGTAPKLLIYDNH | (Human) | (Human) | (Human) | (Human) | | FLTAPQNGP | | VVV | (https://science.science |
| | KRPSGIPDRFSGSKSGTSATLGITGLQT | | | | | | WFDS | | | mag.org/content/early/ |
| | GDEADYYCETWDSSLSVVVFGGGTKV | | | | | | | | | 2020/06/15/science.abc |
| | TVL | | | | | | | | | 7424) |
| mAb-190 | QSVLTQPPSVSATPGQKVTISCSGSSS | IGHV4-39 | IGHJ4 | IGLV1-51 | IGLJ3 | 2981 | ARHSQKDIVLI | 4171 | GTWDSRLS | Anna Wec et al., 2020 |
| | NIGNNYVSWYQQLPGTAPKLLIYDNN | (Human) | (Human) | (Human) | (Human) | | PAAQSPIFDY | | AVV | (https://science.science |
| | KRPSGIPDRFSGSKSGTSATLGITGLQT | | | | | | | | | mag.org/content/early/ |
| | GDEADYYCGTWDSRLSAVVFGGGTKL | | | | | | | | | 2020/06/15/science.abc |
| | TVL | | | | | | | | | 7424) |
| mAb-191 | DIRVTQSPATLSLSPGERATLSCRASEN | IGHV3-64D | IGHJ1 | IGKV3-11 | IGKJ3 | 2982 | VKDGGYYDSS | 4172 | QQRSNWP | Anna Wec et al., 2020 |
| | IAHYLAWYQQKPGQAPRLVIYDASSR | (Human) | (Human) | (Human) | (Human) | | GPGH | | QN | (https://science.science |
| | ATGIPGRFSGSGAGTDFTLTINSLEPED | | | | | | | | | mag.org/content/early/ |
| | FAVYYCQQRSNWPQNFGGGTKVDIK | | | | | | | | | 2020/06/15/science.abc |
| | | | | | | | | | | 7424) |
| mAb-192 | DIRLTQSPSSLSASVGDRVTITCRASQD | IGHV3-30 | IGHJ5 | IGKV1D-16 | IGKJ5 | 2983 | ARESRSSGRA | 4173 | QQYDSYPV | Anna Wec et al., 2020 |
| | ISSWLAWYQQKSGKAPKSLIYAASSLQ | (Human) | (Human) | (Human) | (Human) | | GCFDS | | T | (https://science.science |
| | NGVPSRFSGSRSGTDFTLTISSLQPEDL | | | | | | | | | mag.org/content/early/ |
| | GTYYCQQYDSYPVTFGQGTRLEIK | | | | | | | | | 2020/06/15/science.abc |
| | | | | | | | | | | 7424) |
| mAb-193 | DIVLTQTPDSLAVSLGERATINCKSSQS | IGHV3-30 | IGHJ4 | IGKV4-1 | IGKJ1 | 2984 | ARAYGGNYQ | 4174 | QQYYTMW | Anna Wec et al., 2020 |
| | VLYSSNNKNYLAWYQQKPGQPPKLLI | (Human) | (Human) | (Human) | (Human) | | NHFDH | | T | (https://science.science |
| | YWASTRESGVPDRFSGSGSGTDFTLTI | | | | | | | | | mag.org/content/early/ |
| | SSLQAEDVAVYYCQQYYTMWTFGQG | | | | | | | | | 2020/06/15/science.abc |
| | TKVEIK | | | | | | | | | 7424) |
| mAb-194 | QSVLTQPPSVSAAPGQKVTISCSGSSS | IGHV4-34 | IGHJ5 | IGLV1-51 | IGLJ1 | 2985 | ARGTISPIVGV | 4175 | GTWDSSLS | Anna Wec et al., 2020 |
| | NIGNDYVSWYQQLPGTAPKLLIYENYK | (Human) | (Human) | (Human) | (Human) | | PTPVVPRRGR | | VDNYV | (https://science.science |
| | RPSGIPDRFSGSKSGTSATLDITGLQTG | | | | | | SWFDP | | | mag.org/content/early/ |
| | DEADYYCGTWDSSLSVDNYVFGTGTK | | | | | | | | | 2020/06/15/science.abc |
| | LTVL | | | | | | | | | 7424) |
| mAb-195 | DIVLTQSPLSLPVTLGQPASISCRSSQS | IGHV1-69 | IGHJ6 | IGKV2-30 | IGKJ3 | 2986 | VRDSDPYTAT | 4176 | MQGTDW | Anna Wec et al., 2020 |
| | VVHSDGNTYLNWFHQRPGQSPRRLIY | (Human) | (Human) | (Human) | (Human) | | SRNNHYWYA | | PRT | (https://science.science |
| | KVSNRDSGVPDRFSGSGSGTDFTLKIS | | | | | | MDV | | | mag.org/content/early/ |
| | RVEAEDIGVYYCMQGTDWPRTFGQG | | | | | | | | | 2020/06/15/science.abc |
| | TKVDIK | | | | | | | | | 7424) |

| | | | | | Not | | | | | |
|---|---|---|---|---|---|---|---|---|---|---|
| | Ab | | | Neutral- | Neutral- | | | SEQ | | SEQ |
| | or | | Doesn't | ising | ising | Protein + | | ID | | ID |
| Name | Nb | Binds to | Bind to | Vs | Vs | Epitope | Origin | NO.: | VH or VHH | NO.: |
| mAb-196 | Ab | SARS-CoV2 | 229E, | | | S; Unk | B-cells; SARS-CoV1 | 881 | QVQLVQSGAEVREPGSSVKLSCKTSGGP | 1948 |
| | | (weak) | HKU1, | | | | Human Patient | | FSTHAFSWVRQAPGQRPEWMGGIMP | |
| | | | NL63, | | | | | | VFGESKDTQKFKGRVTFTADASTTTTYM | |
| | | | OC43, | | | | | | ELRSLKSDDTAIYYCVRDSDPYTATSSHN | |
| | | | SARS- | | | | | | HYWYAMDVWGQGTTVTVSS | |
| | | | CoV1 | | | | | | | |
| mAb-197 | Ab | SARS-CoV2 | 229E, | | | S; Unk | B-cells; SARS-CoV1 | 882 | QVQLVESGGGLVKPGGSLRLSCAASGFT | 1949 |
| | | (weak) | HKU1, | | | | Human Patient | | FSDYYMIWIRQAPGKGLEWLSYISHTAS | |
| | | | NL63, | | | | | | TIYYADSVKGRFTISRDNAKNSLFLQMNS | |
| | | | OC43, | | | | | | LTAEDTAVYYCARDRGSGVIDPWGQGT | |
| | | | SARS- | | | | | | LVTVSS | |
| | | | CoV1 | | | | | | | |
| mAb-2 | Ab | SARS-CoV1, | 229E, | | | S; Unk | B-cells; SARS-CoV1 | 883 | QVQLVESGGGLVQPGGSLRLSCSASGFT | 1950 |
| | | SARS-CoV2 | HKU1, | | | | Human Patient | | FSRFAMHWVRQAPGKGLEYVSAINLNG | |
| | | | NL63, | | | | | | DSTYYTDSVRGRFTISRDNSKNTLYLQMS | |
| | | | OC43 | | | | | | SVRPDDTAFYYCVKDGGYYDSSGPGHW | |
| | | | | | | | | | GQGTLVTVSS | |
| mAb-20 | Ab | OC43, SARS- | 229E, | | | S; Unk | B-cells; SARS-CoV1 | 884 | EVQLVESGPGLVKPSETLSLTCTVSGASV | 1951 |
| | | CoV1, SARS- | HKU1, | | | | Human Patient | | TAGSSYWGWIRQPPGKGLEWIGYMFSS | |
| | | CoV2 | NL63, | | | | | | GNTKYNPSLKSRVTISADTSKNQFSLRLS | |
| | | | OC43 | | | | | | SVTAADTAVYFCARVGWVRYFDWSKPY | |
| | | | | | | | | | YYFDLWGRGTLVTVSS | |
| mAb-21 | Ab | SARS-CoV1, | 229E, | | | S; Unk | B-cells; SARS-CoV1 | 885 | EVQLVESGGGLVQPGGSLRLSCAASGFT | 1952 |
| | | SARS-CoV2 | HKU1, | | | | Human Patient | | FSTSAMSWVRQAPGKGLEWVSRIGGG | |
| | | | NL63, | | | | | | GGRTKYADSVKGRFTISRDNSKNTLYLQ | |
| | | | OC43 | | | | | | MNSLRADDTAVYYCAKCDLVRYFDWLG | |
| | | | | | | | | | EENNWFDPWGQGTLVTVSS | |
| mAb-22 | Ab | SARS-CoV1, | 229E, | | | S; Unk | B-cells; SARS-CoV1 | 886 | QVQLVQSGAEVRKPGSSVKLSCKASGG | 1953 |
| | | SARS-CoV2 | HKU1, | | | | Human Patient | | TFSTHAISWVRQAPGQRPEWMGGIMP | |
| | | | NL63, | | | | | | IFGESKDTQKFQGRVTFTADESTTTAYM | |
| | | | OC43 | | | | | | ELRSLKSDDTAIYYCVRDSDPYTATVRNN | |
| | | | | | | | | | HYWYALDVWGPGTMVTVSS | |
| mAb-23 | Ab | SARS-CoV1, | 229E, | | | S; Unk | B-cells; SARS-CoV1 | 887 | EVQLVESGGGLSQPGGSLRLSCAASGFT | 1954 |
| | | SARS-CoV2 | HKU1, | | | | Human Patient | | VRTYCMNWVRQAPGKGLEWVSLVCG | |
| | | | NL63, | | | | | | DNIDYYPDSVKGRFSISRDDSKNTLLLH | |
| | | | OC43 | | | | | | MDSLRVEDTAVYYCARATPPGGGTGW | |
| | | | | | | | | | PYFDFWGQGTLVTVSS | |
| mAb-24 | Ab | SARS-CoV1 | 229E, | | | S; Unk | B-cells; SARS-CoV1 | 888 | QVQLVQSGAEMRKPGSSVKVSCKASGG | 1955 |
| | | (weak), | HKU1, | | | | Human Patient | | TFSRYCFSWVRQAPGQRLEWMGGIMS | |
| | | SARS-CoV2 | NL63, | | | | | | ILGAHYAQKFQGRVTFTADESTNTAYME | |
| | | | OC43 | | | | | | LISLTSEDTAVYYCAREEPSGTYHNYYGL | |
| | | | | | | | | | DVWGQGTTVTVSS | |
| mAb-25 | Ab | SARS-CoV1, | 229E, | | | S; Unk | B-cells; SARS-CoV1 | 889 | QVQLQESGPGLVKPSGTLSLTCAVSGGS | 1956 |
| | | SARS-CoV2 | HKU1, | | | | Human Patient | | ISSSDWCSWVRQPPGKGPEWIAEISHS | |
| | | | NL63, | | | | | | GSTNYNPSLKSRVTMSVDRSKNQFSLNL | |
| | | | OC43 | | | | | | NSVTAADTAVYYCAARIRGATHYDFWS | |
| | | | | | | | | | GFWAGPFDIWGQGTTVTVSS | |
| mAb-26 | Ab | SARS-CoV1, | 229E, | | | S; Unk | B-cells; SARS-CoV1 | 890 | EVQLQESGPGLVKPSGTLSLTCGVSGVSI | 1957 |
| | | SARS-CoV2 | HKU1, | | | | Human Patient | | SSSSWWSWVRQPPGRGLEWIGEISPSG | |
| | | | NL63, | | | | | | STSYNPSFRSRLTMSVDKSRNQLSLKLSS | |
| | | | OC43 | | | | | | VTAADTAVYYCARTQSNDFWSGYYTAA | |
| | | | | | | | | | FDLWGQGTMVTVSS | |
| mAb-27 | Ab | SARS-CoV1, | 229E, | | | S; Unk | B-cells; SARS-CoV1 | 891 | QVQLVQWGAGLLKPSETLSLTCAVYGG | 1958 |
| | | SARS-CoV2 | HKU1, | | | | Human Patient | | SFSGFHWSWIRQPPGKGLEWIGEINHS | |
| | | | NL63, | | | | | | GSTKYNPSLKSRVTISVDTSKNQFSLRLRS | |
| | | | OC43 | | | | | | VTAADTAIYYCARGSLSREYDFLTAPQN | |
| | | | | | | | | | GPWFDSWGQGALVTVSS | |
| mAb-28 | Ab | SARS-CoV1, | 229E, | | | S; Unk | B-cells; SARS-CoV1 | 892 | EVQLVESGPELKKPGSSVRVSCKASGGS | 1959 |
| | | SARS-CoV2 | HKU1, | | | | Human Patient | | FSNFAVSWVRQAPGQRLEWMGGVIPR | |
| | | | NL63, | | | | | | FGRSEYVQKFQGRVTITVDEAASTAYME | |
| | | | OC43 | | | | | | LSSLRSEDTAIYYCVLDTTSANPHNWYG | |
| | | | | | | | | | MDVWGQGTTVTVSS | |
| mAb-29 | Ab | SARS-CoV1, | 229E, | | | S; Unk | B-cells; SARS-CoV1 | 893 | QVQLVQSGGGVVNPGGSLRLSCVGSGF | 1960 |
| | | SARS-CoV2 | HKU1, | | | | Human Patient | | TFSDYYMGWIRQAPGKGLEVISYISSTGS | |
| | | | NL63, | | | | | | YIRDADSVKGRFTISRDNAENSVYLQMN | |
| | | | OC43 | | | | | | SLRGEDTAVYYCARMGPYGSGSFDYWG | |
| | | | | | | | | | LGTLVTVSS | |
| mAb-3 | Ab | SARS-CoV1, | 229E, | | | S; Unk | B-cells; SARS-CoV1 | 894 | QVQLQESGPGLVRPSETLSLTCTVSGDS | 1961 |
| | | SARS-CoV2 | HKU1, | | | | Human Patient | | VSSSDYHWGWIRQPPGKGLEWIGSIYY | |
| | | | NL63, | | | | | | GGRSHFNPSLKSRVAIFVDTSNNQFSLRL | |
| | | | OC43 | | | | | | NSVTASDTAVYFCAGRHQELLPMGSFD | |
| | | | | | | | | | MWAQGTTVTVSS | |

| | | | | | | SEQ | | SEQ | | |
|---|---|---|---|---|---|---|---|---|---|---|
| | | Heavy V | Heavy J | Light V | Light J | ID | | ID | | |
| Name | VL | Gene | Gene | Gene | Gene | NO.: | CDRH3 | NO.: | CDRL3 | Sources |
| mAb-196 | ETTLTQSPLSLPVTLGQPASISCRSSQV | IGHV1-69 | IGHJ6 | IGKV2-30 | IGKJ3 | 2987 | VRDSDPYTAT | 4177 | MQGTEW | Anna Wec et al., 2020 |
| | LVHSDGNTYLNWFQQRPGQSPRRLIY | (Human) | (Human) | (Human) | (Human) | | SSHNHYWYA | | PRT | (https://science.science |
| | KVSNRDSGVPDRFSGSGSGIDFTLKISR | | | | | | MDV | | | mag.org/content/early/ |
| | VEAEDIGVYYCMQGTEWPRTFGQGT | | | | | | | | | 2020/06/15/science.abc |
| | KVDIK | | | | | | | | | 7424) |
| mAb-197 | DIQLTQSPSSLSASVGDRVTITCRASQS | IGHV3-11 | IGHJ5 | IGKV1-39 | IGKJ4 | 2988 | ARDRGSGVID | 4178 | QQSYSTPL | Anna Wec et al., 2020 |
| | ISHYLNWYQQKPGKAPKLLIYAASNLQ | (Human) | (Human) | (Human) | (Human) | | P | | T | (https://science.science |
| | SGVPSRFSGNGSGTDFTLTISSLQPEDF | | | | | | | | | mag.org/content/early/ |
| | ATYFCQQSYSTPLTFGGGTKVDIK | | | | | | | | | 2020/06/15/science.abc |
| | | | | | | | | | | 7424) |
| mAb-2 | EIVLTQSPATLSLSPGERATLSCRASENI | IGHV3- | IGHJ1 | IGKV3-11 | IGKJ4 | 2989 | VKDGGYYDSS | 4179 | QQRSNWP | Anna Wec et al., 2020 |
| | AHYLAWYQQKPGQAPRLVIYDASSRA | 64D | (Human) | (Human) | (Human) | | GPGH | | QN | (https://science.science |
| | TGIPGRFSGSGAGTDFTLTINSLEPEDF | (Human) | | | | | | | | mag.org/content/early/ |
| | AVYYCQQRSNWPQNFGGGTKVEIK | | | | | | | | | 2020/06/15/science.abc |
| | | | | | | | | | | 7424) |
| mAb-20 | QSVLTQPPSVSGAPGQRVTISCTGSSS | IGHV4-59 | IGHJ2 | IGLV1-40 | IGLJ6 | 2990 | ARVGWVRYF | 4180 | QSYDSSLS | Anna Wec et al., 2020 |
| | NIGAGYYVHWYQQLPGTAPKLLIYDN | (Human) | (Human) | (Human) | (Human) | | DWSKPYYYFD | | AS | (https://science.science |
| | NNRPSGVPDRFSGSRSGTSASLAITGL | | | | | | L | | | mag.org/content/early/ |
| | QAEDEGDYFCQSYDSSLSASFGGGTK | | | | | | | | | 2020/06/15/science.abc |
| | VTVL | | | | | | | | | 7424) |
| mAb-21 | QSVLTQPPSVSGAPGQRVTISCTGSNS | IGHV3-23 | IGHJ5 | IGLV1-40 | IGLJ3 | 2991 | AKCDLVRYFD | 4181 | QSYDSSLS | Anna Wec et al., 2020 |
| | NIGAGYDVHWYQQLPETAPKLLIYAN | (Human) | (Human) | (Human) | (Human) | | WLGEENNWF | | GVL | (https://science.science |
| | GNRPSGVPDRFSGSKSGTSASLAITGL | | | | | | DP | | | mag.org/content/early/ |
| | QAEDEADYYCQSYDSSLSGVLFGGGT | | | | | | | | | 2020/06/15/science.abc |
| | KLTVL | | | | | | | | | 7424) |
| mAb-22 | DIQLTQSPLSLPVTLGQPASISCRSSQH | IGHV1-69 | IGHJ3 | IGKV2-30 | IGKJ1 | 2992 | VRDSDPYTAT | 4182 | MQGTEW | Anna Wec et al., 2020 |
| | LVHSDGNTYLNWFQQRPGQSPRRLIY | (Human) | (Human) | (Human) | (Human) | | VRNNHYWYA | | PRT | (https://science.science |
| | KVSNRDSGVPDRFSGSGSGIDFTLKISR | | | | | | LDV | | | mag.org/content/early/ |
| | VEAEDIGVYYCMQGTEWPRTFGQGT | | | | | | | | | 2020/06/15/science.abc |
| | KVEIK | | | | | | | | | 7424) |
| mAb-23 | DIQVTQSPATVSVSPGEGASLSCRASQ | IGHV3-66 | IGHJ4 | IGKV3-15 | IGKJ4 | 2993 | ARATPPGGG | 4183 | QQYNTWP | Anna Wec et al., 2020 |
| | SVRSNLAWFQQKPGQAPRLLISDAST | (Human) | (Human) | (Human) | (Human) | | TGWPYFDF | | PLT | (https://science.science |
| | RASGVPARFTGSGFGTEFTLTISSLQSE | | | | | | | | | mag.org/content/early/ |
| | DFAIYYCQQYNTWPPLTFGGGTKVEIK | | | | | | | | | 2020/06/15/science.abc |
| | | | | | | | | | | 7424) |
| mAb-24 | DIRLTQSPLSLPVTLGQPASISCRSSQSL | IGHV1-69 | IGHJ6 | IGKV2-30 | IGKJ4 | 2994 | AREEPSGTYH | 4184 | MQGTHW | Anna Wec et al., 2020 |
| | VHSNGNTYLNWFQQRPGQSPRRLIYE | (Human) | (Human) | (Human) | (Human) | | NYYGLDV | | PRS | (https://science.science |
| | VSNRDSGVPDRFTGSGSGTDFTLKISR | | | | | | | | | mag.org/content/early/ |
| | VEAEDVGVYYCMQGTHWPRSFGGG | | | | | | | | | 2020/06/15/science.abc |
| | TKVEIK | | | | | | | | | 7424) |
| mAb-25 | ETTLTQSPGTLSLSPGERATLSCRASQSI | IGHV4-4 | IGHJ3 | IGKV3-20 | IGKJ1 | 2995 | AARIRGATHY | 4185 | QQYGSAPL | Anna Wec et al., 2020 |
| | GSSYLAWYQQKPGQAPRLLIYGASSR | (Human) | (Human) | (Human) | (Human) | | DFWSGFWA | | YT | (https://science.science |
| | ATGIPDRFSGSGSGTDFTLTISRLEPED | | | | | | GPFDI | | | mag.org/content/early/ |
| | FAVYYCQQYGSAPLYTFGQGTKVEIK | | | | | | | | | 2020/06/15/science.abc |
| | | | | | | | | | | 7424) |
| mAb-26 | EIVLTQSPGTLSLSPGERASLSCRASQS | IGHV4-4 | IGHJ3 | IGKV3-20 | IGKJ3 | 2996 | ARTQSNDFW | 4186 | QQYGNSP | Anna Wec et al., 2020 |
| | VSSSYLAWYQHRPGQAPRLLIYDASSR | (Human) | (Human) | (Human) | (Human) | | SGYYTAAFDL | | RT | (https://science.science |
| | ATGIPDRFSGSGSGTDFTLTISRLESED | | | | | | | | | mag.org/content/early/ |
| | FAVYYCQQYGNSPRTFGQGTKVDIK | | | | | | | | | 2020/06/15/science.abc |
| | | | | | | | | | | 7424) |
| mAb-27 | QPVLTQPPSVSAAPGQKVTISCSGSSS | IGHV4-34 | IGHJ5 | IGLV1-51 | IGLJ3 | 2997 | ARGSLSREYD | 4187 | ETWDTSLS | Anna Wec et al., 2020 |
| | NIGDNYVSWYQQLPGTAPKLLIYDNN | (Human) | (Human) | (Human) | (Human) | | FLTAPQNGP | | VVV | (https://science.science |
| | KRPSGIPDRFSGSKSGTSATLGITGLQT | | | | | | WFDS | | | mag.org/content/early/ |
| | GDEADYYCETWDTSLSVVVFGGGTKL | | | | | | | | | 2020/06/15/science.abc |
| | TVL | | | | | | | | | 7424) |
| mAb-28 | DIVMTQTPLSLAVTLGQPASISCRSSH | IGHV1-69 | IGHJ6 | IGKV2-30 | IGKJ1 | 2998 | VLDTTSANPH | 4188 | MQGTDW | Anna Wec et al., 2020 |
| | GLVHTNGNTYLNWFHQRPGQPPRRL | (Human) | (Human) | (Human) | (Human) | | NWYGMDV | | PRT | (https://science.science |
| | IYKISNRDSGVPDRFSGSGSGTDFTLKI | | | | | | | | | mag.org/content/early/ |
| | SRVEADDVGVYYCMQGTDWPRTFG | | | | | | | | | 2020/06/15/science.abc |
| | QGTKVEIK | | | | | | | | | 7424) |
| mAb-29 | EIVLTQSPGTLSLSPGERATLSCRASQT | IGHV3-11 | IGHJ4 | IGKV3-20 | IGKJ2 | 2999 | ARMGPYGSG | 4189 | LQYSDATT | Anna Wec et al., 2020 |
| | VTRSQLAWYQHKPGQPPRLLIYDSSKR | (Human) | (Human) | (Human) | (Human) | | SFDY | | | (https://science.science |
| | ATGSPDRFSASGSGTDFTLTISGLEPED | | | | | | | | | mag.org/content/early/ |
| | TGIYYCLQYSDATTFGPGTKLEIK | | | | | | | | | 2020/06/15/science.abc |
| | | | | | | | | | | 7424) |
| mAb-3 | EIVMTQSPSSLSASIGDRVTISCRASQN | IGHV4-38- | IGHJ4 | IGKV1-39 | IGKJ5 | 3000 | AGRHQELLP | 4190 | QQSYTTPI | Anna Wec et al., 2020 |
| | IGSYLNWYQQRPGKAPNLLIFVASSLQ | 2 | (Human) | (Human) | (Human) | | MGSFDM | | T | (https://science.science |
| | SGVPSRFSGSGSGTDFTLTISSLQAEDF | (Human) | | | | | | | | mag.org/content/early/ |
| | ATYYCQQSYTTPITFGQGTRLEIK | | | | | | | | | 2020/06/15/science.abc |
| | | | | | | | | | | 7424) |

| | | | | | Not | | | | | |
|---|---|---|---|---|---|---|---|---|---|---|
| | Ab | | | Neutral- | Neutral- | | | SEQ | | SEQ |
| | or | | Doesn't | ising | ising | Protein + | | ID | | ID |
| Name | Nb | Binds to | Bind to | Vs | Vs | Epitope | Origin | NO.: | VH or VHH | NO.: |
| mAb-30 | Ab | SARS-CoV2 | 229E, | | | S; Unk | B-cells; SARS-CoV1 | 895 | PGPACTVWAEVKKPGSSVKVSCKASGG | 1962 |
| | | | HKU1, | | | | Human Patient | | MFSDYAISWVRQAPGQRLEWMGGIM | |
| | | | NL63, | | | | | | PGLGSPGYAQIFRGRATISADVSTSTAYL | |
| | | | OC43, | | | | | | ELTSLKPEDTAVYYCARDPSILNTGNHH | |
| | | | SARS- | | | | | | WYDLDIWGQGTQVTVSS | |
| | | | CoV1 | | | | | | | |
| mAb-31 | Ab | SARS-CoV2 | 229E, | | | S; Unk | B-cells; SARS-CoV1 | 896 | QVQLVQSGAEVKKPGSSVKVSCKASGG | 1963 |
| | | | HKU1, | | | | Human Patient | | TSSTHAISWVRQAPGQGLEWMGGIIPIF | |
| | | | NL63, | | | | | | GTTNYAQKFQDRVTITADESTSTAYMEL | |
| | | | OC43, | | | | | | SSLRSEDTAVYFCVRDGAYDSSGYYSTQ | |
| | | | SARS- | | | | | | WGQGTLVTVSS | |
| | | | CoV1 | | | | | | | |
| mAb-32 | Ab | SARS-CoV1, | 229E, | | | S; Unk | B-cells; SARS-CoV1 | 897 | EVQLVQSGAEVKKPGSSVKVSCKVSGG | 1964 |
| | | SARS-CoV2 | HKU1, | | | | Human Patient | | RFSDYAISWLRQAPVKGLEWMGGIIPRL | |
| | | | NL63, | | | | | | NRKGYSQDFQGRLTFTADESTSTAYMEL | |
| | | | OC43 | | | | | | SGLTSEDTAVYYCARDPTFLNSGNHFWY | |
| | | | | | | | | | AVDIWGQGTTVTVSS | |
| mAb-33 | Ab | SARS-CoV1, | 229E, | | | S; Unk | B-cells; SARS-CoV1 | 898 | QVQLVQSGAEVKKPGSSVTVSCKVSGG | 1965 |
| | | SARS-CoV2 | HKU1, | | | | Human Patient | | RFSDYAISWLRQAPVEGLEWMGGIIPHL | |
| | | | NL63, | | | | | | NKKGYSQKFQDRITFTADESTSTAYMEL | |
| | | | OC43 | | | | | | SGLTSEDTAIYYCARDPTFLNTGNHFWY | |
| | | | | | | | | | AVDIWGQGTTVTVSS | |
| mAb-34 | Ab | SARS-CoV1, | 229E, | | | S; Unk | B-cells; SARS-CoV1 | 899 | QVQLVQSGAEVKKPGASVKVSCKASGY | 1966 |
| | | SARS-CoV2 | HKU1, | | | | Human Patient | | TFSLFHVHWVRQAPGQGLEWMGWIN | |
| | | | NL63, | | | | | | PHNGDTTFAERFQGRVALTRDTSINTAY | |
| | | | OC43 | | | | | | MELSRLTSDDTAVYFCARDFGVRYDDSR | |
| | | | | | | | | | QLMKYCDSWGQGTLVTVSS | |
| mAb-35 | Ab | SARS-CoV1, | 229E, | | | S; Unk | B-cells; SARS-CoV1 | 900 | QVQLVQSGAEVKKPGSSVKVSCKASGG | 1967 |
| | | SARS-CoV2 | HKU1, | | | | Human Patient | | TLADYAISWVRQAPGQGLEWMGGIKP | |
| | | | NL63, | | | | | | LHGAAGYSQLFRGRLSITADESASTAYM | |
| | | | OC43 | | | | | | ELTGLTSDDTAMYYCARDPSILNTGNHH | |
| | | | | | | | | | WYDLDLWGQGTTVTVSS | |
| mAb-36 | Ab | SARS-CoV1, | 229E, | | | S; Unk | B-cells; SARS-CoV1 | 901 | QVQLVQSGPELKKPGSSVRVSCKASGGS | 1968 |
| | | SARS-CoV2 | HKU1, | | | | Human Patient | | ISSYAISWVRQAPGQRLEWMGGVLPM | |
| | | | NL63, | | | | | | MGRESPVQKFKDRVTIAADESTSTAYM | |
| | | | OC43 | | | | | | ELRSLSAEDTAVYYCVVDTTMADPHNW | |
| | | | | | | | | | YGLDVWGQGTTVTVSS | |
| mAb-37 | Ab | SARS-CoV1, | 229E, | | | S; Unk | B-cells; SARS-CoV1 | 902 | QVQLVQSGPGLVRPSGTLSLTCAVSGDS | 1969 |
| | | SARS-CoV2 | HKU1, | | | | Human Patient | | ISGDYWCTWVRQTPGKGLEWIGKISHS | |
| | | | NL63, | | | | | | GSINYNPSLKSRITMSVDKSKNQFSLKLN | |
| | | | OC43 | | | | | | SVTAADTAMYYCARVRVGASHHNFWS | |
| | | | | | | | | | GYYTDAFDIWGQGTTVTVSS | |
| mAb-38 | Ab | SARS-CoV1, | 229E, | | | S; Unk | B-cells; SARS-CoV1 | 903 | QVQLVQSGAEVKKPGSSVKVSCKVSGG | 1970 |
| | | SARS-CoV2 | HKU1, | | | | Human Patient | | TFSNYAISWLRQAPGQGPEWMGGIIPA | |
| | | | NL63, | | | | | | LSRVGYARKFQARLTISADELTTTAYMDL | |
| | | | OC43 | | | | | | SSLTSEDTAVYYCARDPSFLNTGNHFWY | |
| | | | | | | | | | DFDMWGQGTTVTVSS | |
| mAb-39 | Ab | SARS-CoV2 | 229E, | | | S; Unk | B-cells; SARS-CoV1 | 904 | EVQLQQSGAEVKKPGSSVKVSCKASGG | 1971 |
| | | | HKU1, | | | | Human Patient | | TSSTHAISWVRQAPGQGLEWMGGIIPIF | |
| | | | NL63, | | | | | | GTTNYAQKFQDRVTITADESTSTAYMEL | |
| | | | OC43, | | | | | | SSLRSEDTAVYFCVRDGAYDSSGYYSTQ | |
| | | | SARS- | | | | | | WGQGTLVTVSS | |
| | | | CoV1 | | | | | | | |
| mAb-4 | Ab | SARS-CoV1, | 229E, | | | S; Unk | B-cells; SARS-CoV1 | 905 | EVQLVESGGGLVKPGGSLRLSCAASGFT | 1972 |
| | | SARS-CoV2 | HKU1, | | | | Human Patient | | FSDYYMNWVRQAPGKGLEWVSSISSSS | |
| | | | NL63, | | | | | | YMYYADSMKGRFTISRDNAQNSLYLQM | |
| | | | OC43 | | | | | | SSLRAEDTAVYYCARDFPGDTAVAGTGF | |
| | | | | | | | | | NYWGQGTLVTVSS | |
| mAb-40 | Ab | SARS-CoV2 | 229E, | | | S; Unk | B-cells; SARS-CoV1 | 906 | QVQLVESGGDLVKPGRSLRLSCTASGFTI | 1973 |
| | | | HKU1, | | | | Human Patient | | GDYAMTWFRQAPGKGLECVAVIRSRAF | |
| | | | NL63, | | | | | | GGTTEYAASVKGRFIVSRDDSNSVAFLQ | |
| | | | OC43, | | | | | | MNSLKTEDTAVYYCSRDLRRGYYDSNG | |
| | | | SARS- | | | | | | HQQFDLWGQGTLVTVSS | |
| | | | CoV1 | | | | | | | |
| mAb-41 | Ab | SARS-CoV2 | 229E, | | | S; Unk | B-cells; SARS-CoV1 | 907 | QVQLVESGGGVVQPGRSLRLSCAASGF | 1974 |
| | | | HKU1, | | | | Human Patient | | TFSRYGMHWVRQAPGKGLEWVAVIYS | |
| | | | NL63, | | | | | | DGRNEYYADSVKGRFTISRDNSKNTLHL | |
| | | | OC43, | | | | | | QMNSLGAADTAVYYCARDPGPITFFDW | |
| | | | SARS- | | | | | | SPDKSRKSYYDYNGMDVWGQGTTVTV | |
| | | | CoV1 | | | | | | SS | |

| | | | | | | SEQ | | SEQ | | |
|---|---|---|---|---|---|---|---|---|---|---|
| | | Heavy V | Heavy J | Light V | Light J | ID | | ID | | |
| Name | VL | Gene | Gene | Gene | Gene | NO.: | CDRH3 | NO.: | CDRL3 | Sources |
| mAb-30 | DIVMTQSPLSLPVGLGQSASISCRSSQ | IGHV1-69 | IGHJ3 | IGKV2-30 | IGKJ1 | 3001 | ARDPSILNTG | 4191 | MQATEWP | Anna Wec et al., 2020 |
| | RVVHTDGNTYLNWFHQRPGQSPRRLI | (Human) | (Human) | (Human) | (Human) | | NHHWYDLDI | | RT | (https://science.science |
| | YKVSNRDSGVPDRFSGSGSGTDFTLRI | | | | | | | | | mag.org/content/early/ |
| | SRVEAEDVGVYYCMQATEWPRTFGQ | | | | | | | | | 2020/06/15/science.abc |
| | GTKVEIK | | | | | | | | | 7424) |
| mAb-31 | EIVLTQSPATLSLSPGERATLSCRASQS | IGHV1-69 | IGHJ4 | IGKV3-11 | IGKJ2 | 3002 | VRDGAYDSS | 4192 | QQRRNWP | Anna Wec et al., 2020 |
| | VSNFLAWYQQKPGQPPRLLIYDASNR | (Human) | (Human) | (Human) | (Human) | | GYYSTQ | | PMYT | (https://science.science |
| | ASGIAARFSGRGSGTDFTLTISSLEPED | | | | | | | | | mag.org/content/early/ |
| | FAVYYCQQRRNWPPMYTFGQGTKLEI | | | | | | | | | 2020/06/15/science.abc |
| | K | | | | | | | | | 7424) |
| mAb-32 | EIVLTQSPLSLSVTLGQAASISCTCSQTA | IGHV1-69 | IGHJ6 | IGKV2-30 | IGKJ2 | 3003 | ARDPTFLNSG | 4193 | MQTTDWP | Anna Wec et al., 2020 |
| | VHSDGNTYLNWFHQRPGQSPRRLIYK | (Human) | (Human) | (Human) | (Human) | | NHFWYAVDI | | RT | (https://science.science |
| | VSNRDSGVPDRFSGSGSGTDFTLKISR | | | | | | | | | mag.org/content/early/ |
| | VEAEDVGIYYCMQTTDWPRTFGQGT | | | | | | | | | 2020/06/15/science.abc |
| | KLEIK | | | | | | | | | 7424) |
| mAb-33 | ETTLTQSPLSLSVTLGQAASISCTCSQS | IGHV1-69 | IGHJ6 | IGKV2-30 | IGKJ3 | 3004 | ARDPTFLNTG | 4194 | MQTTDWP | Anna Wec et al., 2020 |
| | AVHSDGNTYFNWFHQRPGQSPRRLIY | (Human) | (Human) | (Human) | (Human) | | NHFWYAVDI | | RT | (https://science.science |
| | KVSNRDSGVPERFSGSGSGTHFTLIISR | | | | | | | | | mag.org/content/early/ |
| | VEAEDVGVYYCMQTTDWPRTFGQGT | | | | | | | | | 2020/06/15/science.abc |
| | KVDIK | | | | | | | | | 7424) |
| mAb-34 | NFMLTQPHSVSESPGKAVIISCTRSSG | IGHV1-2 | IGHJ5 | IGLV6-57 | IGLJ3 | 3005 | ARDFGVRYD | 4195 | QSYDSGNL | Anna Wec et al., 2020 |
| | NIASNFVQWYQQRPGSSPTPVIYEDKL | (Human) | (Human) | (Human) | (Human) | | DSRQLMKYC | | VV | (https://science.science |
| | RPSGVPDRFSGSIDRSSNSASLTISGLK | | | | | | DS | | | mag.org/content/early/ |
| | TEDEADYYCQSYDSGNLVVFGGGTKL | | | | | | | | | 2020/06/15/science.abc |
| | TVL | | | | | | | | | 7424) |
| mAb-35 | DIQMTQSPLSLPVTLGQAASISCRSSQ | IGHV1-69 | IGHJ6 | IGKV2-30 | IGKJ1 | 3006 | ARDPSILNTG | 4196 | MQGTEW | Anna Wec et al., 2020 |
| | PIPHTDGNTYLNWFHQRPGQSPRRLI | (Human) | (Human) | (Human) | (Human) | | NHHWYDLDL | | PRT | (https://science.science |
| | HKVSNRDSGVPDRFSGSGSGLDFTLEI | | | | | | | | | mag.org/content/early/ |
| | SGVEAEDVGIYYCMQGTEWPRTFGQ | | | | | | | | | 2020/06/15/science.abc |
| | GTKVEIK | | | | | | | | | 7424) |
| mAb-36 | EIVMTQTPLSLPVTLGQPASISCRSSHG | IGHV1-69 | IGHJ6 | IGKV2-30 | IGKJ3 | 3007 | VVDTTMADP | 4197 | MQGTDW | Anna Wec et al., 2020 |
| | LVHTNGNTYLNWFHQRPGQPPRRLIY | (Human) | (Human) | (Human) | (Human) | | HNWYGLDV | | PRT | (https://science.science |
| | QVSHRDSGVPDRFSGSGSGTDFTLKIS | | | | | | | | | mag.org/content/early/ |
| | RVEADDVGVYYCMQGTDWPRTFGQ | | | | | | | | | 2020/06/15/science.abc |
| | GTKVDIK | | | | | | | | | 7424) |
| mAb-37 | ETTLTQSPGTLSLSPGERATLSCRASQS | IGHV4-4 | IGHJ3 | IGKV3-20 | IGKJ1 | 3008 | ARVRVGASH | 4198 | QQYGTSPV | Anna Wec et al., 2020 |
| | VGNNYLAWYQQKPGQAPRLLIYGASS | (Human) | (Human) | (Human) | (Human) | | HNFWSGYYT | | YT | (https://science.science |
| | RATGIPDRFSGSGSGTDFTLTISRLEPE | | | | | | DAFDI | | | mag.org/content/early/ |
| | DFAVYYCQQYGTSPVYTFGQGTKVEIK | | | | | | | | | 2020/06/15/science.abc |
| | | | | | | | | | | 7424) |
| mAb-38 | DIQLTQSPLSLPVTLGQPASISCTSSQN | IGHV1-69 | IGHJ4 | IGKV2-30 | IGKJ1 | 3009 | ARDPSFLNTG | 4199 | MQGTDW | Anna Wec et al., 2020 |
| | VVHTDGNTYLNWFHQRPGQSPRRLIY | (Human) | (Human) | (Human) | (Human) | | NHFWYDFD | | PRT | (https://science.science |
| | KVSNRDSGVPDRFSGSGSGSHFTLKIS | | | | | | M | | | mag.org/content/early/ |
| | RVEAEDVGIYYCMQGTDWPRTFGQG | | | | | | | | | 2020/06/15/science.abc |
| | TKVEIK | | | | | | | | | 7424) |
| mAb-39 | DIVLTQTPATLSLSPGERATLSCRASQS | IGHV1-69 | IGHJ4 | IGKV3-11 | IGKJ1 | 3010 | VRDGAYDSS | 4200 | QQRRNWP | Anna Wec et al., 2020 |
| | VSNFLAWYQQKPGQPPRLLIYDASNR | (Human) | (Human) | (Human) | (Human) | | GYYSTQ | | PMYT | (https://science.science |
| | ASGIAARFSGRGSGTDFTLTISSLEPED | | | | | | | | | mag.org/content/early/ |
| | FAVYYCQQRRNWPPMYTFGQGTKVE | | | | | | | | | 2020/06/15/science.abc |
| | IK | | | | | | | | | 7424) |
| mAb-4 | QSVLTQPPSVSGAPGQRVTISCTGSSS | IGHV3-21 | IGHJ4 | IGLV1-40 | IGLJ1 | 3011 | ARDFPGDTA | 4201 | QSYDSSLS | Anna Wec et al., 2020 |
| | NIGAGYDVHWYQQVPGTAPKLLIYGN | (Human) | (Human) | (Human) | (Human) | | VAGTGFNY | | VLYV | (https://science.science |
| | SNRPSGVPDRFSGSKSGTSASLAITGL | | | | | | | | | mag.org/content/early/ |
| | QAEDEADYYCQSYDSSLSVLYVFGTGT | | | | | | | | | 2020/06/15/science.abc |
| | KVTVL | | | | | | | | | 7424) |
| mAb-40 | DIRLTQSPATLSLSPGERATLSCRASQSI | IGHV3-49 | IGHJ4 | IGKV3-11 | IGKJ1 | 3012 | SRDLRRGYYD | 4202 | QHRTNWP | Anna Wec et al., 2020 |
| | GYYLAWFQQKPGQAPRLLIYDASKRA | (Human) | (Human) | (Human) | (Human) | | SNGHQQFDL | | YT | (https://science.science |
| | TGIPARFSGSGSGTDFTLTISSLEPEDFA | | | | | | | | | mag.org/content/early/ |
| | VYYCQHRTNWPYTFGQGTKVEIK | | | | | | | | | 2020/06/15/science.abc |
| | | | | | | | | | | 7424) |
| mAb-41 | QPGLTQEPSLTVSPGGTVTLTCGSSAG | IGHV3-30 | IGHJ6 | IGLV7-46 | IGLJ3 | 3013 | ARDPGPITFF | 4203 | FLSYRGAP | Anna Wec et al., 2020 |
| | AVTSGHYPYWFQQKPGQAPRTLIYDT | (Human) | (Human) | (Human) | (Human) | | DWSPDKSRK | | PV | (https://science.science |
| | NNKYSWTPARFSGSLLGGKAALTLSG | | | | | | SYYDYNGMD | | | mag.org/content/early/ |
| | AQPEDEAEYFCFLSYRGAPPVFGGGT | | | | | | V | | | 2020/06/15/science.abc |
| | HLTVL | | | | | | | | | 7424) |

| | | | | | Not | | | | | |
|---|---|---|---|---|---|---|---|---|---|---|
| | Ab | | | Neutral- | Neutral- | | | SEQ | | SEQ |
| | or | | Doesn't | ising | ising | Protein + | | ID | | ID |
| Name | Nb | Binds to | Bind to | Vs | Vs | Epitope | Origin | NO.: | VH or VHH | NO.: |
| mAb-42 | Ab | SARS-CoV2 | 229E, | | | S; Unk | B-cells; SARS-CoV1 | 908 | EVQLLESGGGVVQPGTSLRLSCVASGFT | 1975 |
| | | | HKU1, | | | | Human Patient | | FSTFAMHWVRQAPGKGLEWVALISFDS | |
| | | | NL63, | | | | | | TNIRYANSVRGRFTISRDNSKNTLYLEVD | |
| | | | OC43, | | | | | | SLRIEDTGVYYCARDLPPLDYWGQGTLV | |
| | | | SARS- | | | | | | TVSS | |
| | | | CoV1 | | | | | | | |
| mAb-43 | Ab | SARS-CoV1, | 229E, | | | S; Unk | B-cells; SARS-CoV1 | 909 | QVQLVQSGAEVRKPGSSVKLSCKASGG | 1976 |
| | | SARS-CoV2 | HKU1, | | | | Human Patient | | TFSTHAISWVRQAPGQRPEWMGGIIPIF | |
| | | | NL63, | | | | | | GESKDTQKFQGRVTFTADESTTTAYMEL | |
| | | | OC43 | | | | | | RSLRSDDTAIYYCVRDSDPYTTTFSHNHY | |
| | | | | | | | | | WYAMDVWGQGTTVTVSS | |
| mAb-44 | Ab | SARS-CoV1, | 229E, | | | S; Unk | B-cells; SARS-CoV1 | 910 | QVQLVQSGGGLVQPGGSLRVSCSASGF | 1977 |
| | | SARS-CoV2 | HKU1, | | | | Human Patient | | TFSSFAMHWVRQAPGKGLEYVAGISDN | |
| | | | NL63, | | | | | | GHTTMYADSVKGRFTISRDNSKNTLYLQ | |
| | | | OC43 | | | | | | LSSLRPEDTAVYFCVKDNVILPGAIVRPQ | |
| | | | | | | | | | FDYWGQGTLVTVSS | |
| mAb-45 | Ab | SARS-CoV2 | 229E, | | | S; Unk | B-cells; SARS-CoV1 | 911 | QVQLVQSGAEVKKPGSSVKVSCKVSGG | 1978 |
| | | | HKU1, | | | | Human Patient | | MFSDYAISWVRQAPGQRLEWMGGIM | |
| | | | NL63, | | | | | | PGLGSPAYAQIFRGRVTISADISTSTAYLE | |
| | | | OC43, | | | | | | VTSLRPEDTAVYYCARDPSILNTGNHHW | |
| | | | SARS- | | | | | | YDLDMWGQGTTVTVSS | |
| | | | CoV1 | | | | | | | |
| mAb-46 | Ab | SARS-CoV1, | 229E, | | | S; Unk | B-cells; SARS-CoV1 | 912 | EVQLVESGGGVVQPGRSLRLSCVASGFT | 1979 |
| | | SARS-CoV2 | HKU1, | | | | Human Patient | | LAPYGMQWVRQAPGKGLEWVAFLSH | |
| | | | NL63, | | | | | | DGSHLGYVDSVKGRFTISRDNSKNTLYLE | |
| | | | OC43 | | | | | | MNSLRAEDTATYYCARDNVVQQNADN | |
| | | | | | | | | | VGYFDFWGQGSLVTVSS | |
| mAb-47 | Ab | SARS-CoV1, | 229E, | | | S; Unk | B-cells; SARS-CoV1 | 913 | QVQLVQSGAEVKKPGSSVKVSCKASGG | 1980 |
| | | SARS-CoV2 | HKU1, | | | | Human Patient | | MFRDYAISWLRQAPGQRLEWMGGIM | |
| | | | NL63, | | | | | | PAFGAPGYAQIFRGRATISADVSTTTAYL | |
| | | | OC43 | | | | | | ELTSLMPDDTAVYYCARDPSILNTGNHH | |
| | | | | | | | | | WYDLDLWGQGTTVTVSS | |
| mAb-48 | Ab | SARS-CoV1, | 229E, | | | S; Unk | B-cells; SARS-CoV1 | 914 | QVTLKESGAEVKKPGSSVKVSCKTSGGT | 1981 |
| | | SARS-CoV2 | HKU1, | | | | Human Patient | | FSTHAISWVRQAPGQGPEWMGGIIPLF | |
| | | | NL63, | | | | | | GTSQHAQRFQARVKFTADESTNTAYME | |
| | | | OC43 | | | | | | LSSLTPEDTAVYYCVRDSDPYTATSRNNH | |
| | | | | | | | | | YWYGMDVWGHGTTVTVSS | |
| mAb-49 | Ab | SARS-CoV1, | 229E, | | | S; Unk | B-cells; SARS-CoV1 | 915 | QVQLVQSGAEVKKPGSSVKVSCKASGG | 1982 |
| | | SARS-CoV2 | HKU1, | | | | Human Patient | | MFSDYAISWVRQAPGQRLEWMGGIM | |
| | | | NL63, | | | | | | PGLGSPAYAQSFGGRVTISADISTSTAYL | |
| | | | OC43 | | | | | | EVTSLRPEDTAVYYCARDPSILNTGNHH | |
| | | | | | | | | | WYDLDMWGQGTMVTVSS | |
| mAb-5 | Ab | SARS-CoV1, | 229E, | | | S; Unk | B-cells; SARS-CoV1 | 916 | EVQLVESGGGLVQPGRSLRLSCSASGFS | 1983 |
| | | SARS-CoV2 | HKU1, | | | | Human Patient | | FGDYAMSWFRQAPGKGLQWVGLIKTR | |
| | | | NL63, | | | | | | AYGAATDYAASVQGRFIISRDDSKSIAYL | |
| | | | OC43 | | | | | | QMNSLKTEDTAVYFCAREGTSLGYYYYY | |
| | | | | | | | | | AMDVWGHGTTVTVSS | |
| mAb-50 | Ab | SARS-CoV1, | 229E, | | | S; Unk | B-cells; SARS-CoV1 | 917 | QVQLVQSGAEVKKPGSSVKVSCKASGG | 1984 |
| | | SARS-CoV2 | HKU1, | | | | Human Patient | | MFSDYAISWVRQAPGQRLEWMGGIM | |
| | | | NL63, | | | | | | PGLGSPAYAQIFRGRVTISADISTSTAYLE | |
| | | | OC43 | | | | | | VTSLRPEDTAVYYCARDPSILNTGNHHW | |
| | | | | | | | | | YDLDMWGQGTTVTVSS | |
| mAb-51 | Ab | SARS-CoV1, | 229E, | | | S; Unk | B-cells; SARS-CoV1 | 918 | EVQLVESGGGLVQPGGSLRLSCLTSGFS | 1985 |
| | | SARS-CoV2 | HKU1, | | | | Human Patient | | FSSYWMIWVRQAPGKGLEWVANIEPD | |
| | | | NL63, | | | | | | GNEEYYVDSVKGRFTISRDNAKNSLYLQ | |
| | | | OC43 | | | | | | MNSLRAEDTAVYYCARGPIRHFGLDAFD | |
| | | | | | | | | | IWGQGTTVTVSS | |
| mAb-52 | Ab | SARS-CoV2 | 229E, | | | S; Unk | B-cells; SARS-CoV1 | 919 | QVQLVQSGDEMKKPGSSVKVSCKASGD | 1986 |
| | | | HKU1, | | | | Human Patient | | TFSTHAISWVRQAPGQGPEWMGGIIPL | |
| | | | NL63, | | | | | | FGTASYAQTSQSRVKITADESTSTAYMEL | |
| | | | OC43, | | | | | | SSLTSEDTAVYYCVRDSDPYTATSRNNHY | |
| | | | SARS- | | | | | | WYGMDVWGQGTTVTVSS | |
| | | | CoV1 | | | | | | | |
| mAb-53 | Ab | SARS-CoV1, | 229E, | | | S; Unk | B-cells; SARS-CoV1 | 920 | QVQLVQSGAEVKKPGSSVKVSCKASGG | 1987 |
| | | SARS-CoV2 | HKU1, | | | | Human Patient | | MFSDYAISWVRQAPGQRLEWMGGIM | |
| | | | NL63, | | | | | | PGLGSPAYAQSFGGRVTISADISTSTAYL | |
| | | | OC43 | | | | | | EVTSLRPEDTAVYYCARDPSILNTGNHH | |
| | | | | | | | | | WYDLDMWGQGTMVTVSS | |

| | | | | | | SEQ | | SEQ | | |
|---|---|---|---|---|---|---|---|---|---|---|
| | | Heavy V | Heavy J | Light V | Light J | ID | | ID | | |
| Name | VL | Gene | Gene | Gene | Gene | NO.: | CDRH3 | NO.: | CDRL3 | Sources |
| mAb-42 | DIRMTQSPFSLSASVGDRVTITCRASQ | IGHV3-30 | IGHJ4 | IGKV1-27 | IGKJ1 | 3014 | ARDLPPLDY | 4204 | QKHDRDP | Anna Wec et al., 2020 |
| | GFGNRLAWYQQKPGRAPKLLIYDAST | (Human) | (Human) | (Human) | (Human) | | | | WT | (https://science.science |
| | LQSGVPSRFSGSGSETDFALTISSLQPE | | | | | | | | | mag.org/content/early/ |
| | DVATYYCQKHDRDPWTFGQGTKVEIK | | | | | | | | | 2020/06/15/science.abc |
| | | | | | | | | | | 7424) |
| mAb-43 | DIVMTQSPLSLPVTLGQPASISCRSSQR | IGHV1-69 | IGHJ6 | IGKV2-30 | IGKJ1 | 3015 | VRDSDPYTTT | 4205 | MQGTEW | Anna Wec et al., 2020 |
| | LVHSDGNTYLNWFQQRPGQSPRRLIY | (Human) | (Human) | (Human) | (Human) | | FSHNHYWYA | | PRT | (https://science.science |
| | KVSNRDSGVPDRFSGSGSGTDFTLKIS | | | | | | MDV | | | mag.org/content/early/ |
| | RVEAEDIGVYYCMQGTEWPRTFGQG | | | | | | | | | 2020/06/15/science.abc |
| | TKVEIK | | | | | | | | | 7424) |
| mAb-44 | ETTLTQSPASVSASVGDRVTISCRASQ | IGHV3- | IGHJ4 | IGKV1-12 | IGKJ4 | 3016 | VKDNVILPGA | 4206 | QQAESFPF | Anna Wec et al., 2020 |
| | GIGRWLAWYQQKPGRAPKLLIFSASSL | 64D | (Human) | (Human) | (Human) | | IVRPQFDY | | T | (https://science.science |
| | QSGVPSRFSGSGSGTDFTLTISSLQPED | (Human) | | | | | | | | mag.org/content/early/ |
| | FATYYCQQAESFPFTFGGGTKVEIK | | | | | | | | | 2020/06/15/science.abc |
| | | | | | | | | | | 7424) |
| mAb-45 | ETTLTQSPLSLPVDLGQSASISCRSSQR | IGHV1-69 | IGHJ6 | IGKV2-30 | IGKJ1 | 3017 | ARDPSILNTG | 4207 | MQATDW | Anna Wec et al., 2020 |
| | VVHTNGNTYLHWFHQRPGQAPRRLI | (Human) | (Human) | (Human) | (Human) | | NHHWYDLD | | PRT | (https://science.science |
| | YKVSNRESGVPDRFSGSGSGTDFTLRI | | | | | | M | | | mag.org/content/early/ |
| | SRVEAEDVGVYYCMQATDWPRTFGQ | | | | | | | | | 2020/06/15/science.abc |
| | GTKVEIK | | | | | | | | | 7424) |
| mAb-46 | CIRLTQSPATLSLSPGERATLSCRASQS | IGHV3-30 | IGHJ4 | IGKV3-11 | IGKJ3 | 3018 | ARDNVVQQN | 4208 | QQRGNGY | Anna Wec et al., 2020 |
| | VTSYLAWYQQRPGQAPRLLIYDTSNR | (Human) | (Human) | (Human) | (Human) | | ADNVGYFDF | | T | (https://science.science |
| | VTGVPVRFSGSGYGTDFTLTISSLEPED | | | | | | | | | mag.org/content/early/ |
| | FAVYYCQQRGNGYTFGPGTKVEIK | | | | | | | | | 2020/06/15/science.abc |
| | | | | | | | | | | 7424) |
| mAb-47 | ETTLTQSPLSLPVGLGQSASISCRSSQR | IGHV1-69 | IGHJ6 | IGKV2-30 | IGKJ3 | 3019 | ARDPSILNTG | 4209 | MQATEWP | Anna Wec et al., 2020 |
| | VVHTDGNTYLNWFHQRPGQSPRRLIY | (Human) | (Human) | (Human) | (Human) | | NHHWYDLDL | | RT | (https://science.science |
| | KVSNRDSGVPDRFSGSGSGTDFTLRIS | | | | | | | | | mag.org/content/early/ |
| | RVEAEDVGVYYCMQATEWPRTFGQG | | | | | | | | | 2020/06/15/science.abc |
| | TKVDIK | | | | | | | | | 7424) |
| mAb-48 | EIVMTQSPLSLPVTLGQPASISCRSSQS | IGHV1-69 | IGHJ6 | IGKV2-30 | IGKJ2 | 3020 | VRDSDPYTAT | 4210 | MQGTDW | Anna Wec et al., 2020 |
| | VVHSDGNTYLNWFHQRPGQSPRRLIY | (Human) | (Human) | (Human) | (Human) | | SRNNHYWYG | | PRT | (https://science.science |
| | KVSNRDSGVPDRFSGSGSGTDFTLKIS | | | | | | MDV | | | mag.org/content/early/ |
| | RVEAEDIGVYYCMQGTDWPRTFGQG | | | | | | | | | 2020/06/15/science.abc |
| | TKLEIK | | | | | | | | | 7424) |
| mAb-49 | DIVMTQSPLSLPVDLGQSASISCRSSQT | IGHV1-69 | IGHJ3 | IGKV2-30 | IGKJ2 | 3021 | ARDPSILNTG | 4211 | MQATDW | Anna Wec et al., 2020 |
| | AVHTNGNTYLHWFHQRPGQAPRRLI | (Human) | (Human) | (Human) | (Human) | | NHHWYDLD | | PRT | (https://science.science |
| | YKVSNRESGVPDRFSGSGSGTDFTLRI | | | | | | M | | | mag.org/content/early/ |
| | NRVEAEDVGVYYCMQATDWPRTFG | | | | | | | | | 2020/06/15/science.abc |
| | QGTKLEIK | | | | | | | | | 7424) |
| mAb-5 | DIVLTQTPSSLSASVGDRVTITCRASQTI | IGHV3-49 | IGHJ6 | IGKV1-39 | IGKJ3 | 3022 | AREGTSLGYY | 4212 | QQSYSVPL | Anna Wec et al., 2020 |
| | SYYLNWYQQKVGKAPQLLVYAASSLQ | (Human) | (Human) | (Human) | (Human) | | YYYAMDV | | T | (https://science.science |
| | SGVPSRFSGSGSGTDFTLTISSLQPEDF | | | | | | | | | mag.org/content/early/ |
| | ATYYCQQSYSVPLTLGQGTKVDIK | | | | | | | | | 2020/06/15/science.abc |
| | | | | | | | | | | 7424) |
| mAb-50 | DIQMTQSPLSLPVDLGQSASISCRSSQ | IGHV1-69 | IGHJ6 | IGKV2-30 | IGKJ1 | 3023 | ARDPSILNTG | 4213 | MQATDW | Anna Wec et al., 2020 |
| | RVVHTNGNTYLHWFHQRPGQAPRRL | (Human) | (Human) | (Human) | (Human) | | NHHWYDLD | | PRT | (https://science.science |
| | IYKVSNRESGVPDRFSGSGSGTDFTLRI | | | | | | M | | | mag.org/content/early/ |
| | SRVEAEDVGVYYCMQATDWPRTFGQ | | | | | | | | | 2020/06/15/science.abc |
| | GTKVEIK | | | | | | | | | 7424) |
| mAb-51 | QPGLTQPASVSGSPGQSITISCTRTSG | IGHV3-7 | IGHJ3 | IGLV2-14 | IGLJ3 | 3024 | ARGPIRHFGL | 4214 | STYTSTSTI | Anna Wec et al., 2020 |
| | DVGDYNSVSWYVSWYQQHPGRAPKL | (Human) | (Human) | (Human) | (Human) | | DAFDI | | | (https://science.science |
| | MLYDVSNRPSGVSNRFSGSKLGDTAS | | | | | | | | | mag.org/content/early/ |
| | LTISELQAEDEADYYCSTYTSTSTIFGGG | | | | | | | | | 2020/06/15/science.abc |
| | TKLTVL | | | | | | | | | 7424) |
| mAb-52 | DIQMTQSPLSLPVTLGQPASISCRASQ | IGHV1-69 | IGHJ6 | IGKV2-30 | IGKJ3 | 3025 | VRDSDPYTAT | 4215 | MQGTDW | Anna Wec et al., 2020 |
| | TVVHTNGNTYLNWFHQRPGQSPRRLI | (Human) | (Human) | (Human) | (Human) | | SRNNHYWYG | | PRT | (https://science.science |
| | YEVSNRDSGVPDRFSGSGSGTDFTLSI | | | | | | MDV | | | mag.org/content/early/ |
| | SRVEAEDIGVYYCMQGTDWPRTFGP | | | | | | | | | 2020/06/15/science.abc |
| | GTKVEIK | | | | | | | | | 7424) |
| mAb-53 | DIRLTQSPLSLPVDLGQSASISCRSSQT | IGHV1-69 | IGHJ3 | IGKV2-30 | IGKJ3 | 3026 | ARDPSILNTG | 4216 | MQATDW | Anna Wec et al., 2020 |
| | VVHTNGNTYLHWFHQRPGQAPRRLI | (Human) | (Human) | (Human) | (Human) | | NHHWYDLD | | PRT | (https://science.science |
| | YKVSNRESGVPDRFSGSGSGTDFTLRI | | | | | | M | | | mag.org/content/early/ |
| | SRVEAEDVGVYYCMQATDWPRTFGQ | | | | | | | | | 2020/06/15/science.abc |
| | GTKVDIK | | | | | | | | | 7424) |

| | | | | | Not | | | | | |
|---|---|---|---|---|---|---|---|---|---|---|
| | Ab | | | Neutral- | Neutral- | | | SEQ | | SEQ |
| | or | | Doesn't | ising | ising | Protein + | | ID | | ID |
| Name | Nb | Binds to | Bind to | Vs | Vs | Epitope | Origin | NO.: | VH or VHH | NO.: |
| mAb-54 | Ab | SARS-CoV1, | 229E, | | | S; Unk | B-cells; SARS-CoV1 | 921 | EVQLVESGGGLVQPGGSLRLSCSASGFT | 1988 |
| | | SARS-CoV2 | HKU1, | | | | Human Patient | | FSNYAMYWVRQAPGKRPEYVSGISSNG | |
| | | | NL63, | | | | | | GITYYADSVEGRFTVSRDNSKKSLYLQM | |
| | | | OC43 | | | | | | SSLRPEDTAVYYCVKDLGATVTYDVFDV | |
| | | | | | | | | | WGQGTMVTVSS | |
| mAb-55 | Ab | SARS-CoV2 | 229E, | | | S; Unk | B-cells; SARS-CoV1 | 922 | EVQLVESGGGLVQPGGSLRLSCAASGFT | 1989 |
| | | | HKU1, | | | | Human Patient | | FSSYSMSWVRQAPGKGLEWVSGHDGG | |
| | | | NL63, | | | | | | TTHYADSVKGRFTISRDDSMNTLSLQM | |
| | | | OC43, | | | | | | NSLRAEDTAVYYCAKERDLPGRGGYFDH | |
| | | | SARS- | | | | | | WGQGTLVTVSS | |
| | | | CoV1 | | | | | | | |
| mAb-56 | Ab | SARS-CoV2 | 229E, | | | S; Unk | B-cells; SARS-CoV1 | 923 | QVQLQQWGAGLLKPSETLSLTCAVYGG | 1990 |
| | | | HKU1, | | | | Human Patient | | SFRGFYWTWIRQPPGKGLEWIGEVSHS | |
| | | | NL63, | | | | | | GETNYNPSLKSRVTISVDTSKNQFSLNLIS | |
| | | | OC43, | | | | | | VTAADTSVYYCARGYTAPIIREVPITFRPR | |
| | | | SARS- | | | | | | WFDPWGQGTPVTVSS | |
| | | | CoV1 | | | | | | | |
| mAb-57 | Ab | SARS-CoV1, | 229E, | | | S; Unk | B-cells; SARS-CoV1 | 924 | QVQLVQSGGGVVNPGGSMRLSCAGSG | 1991 |
| | | SARS-CoV2 | HKU1, | | | | Human Patient | | FTFSDHYMGWIRQAPGKGLEVISYISSS | |
| | | | NL63, | | | | | | GSFIRDADSVKGRFTISRDNAKNSVYLQ | |
| | | | OC43 | | | | | | MNSLRAEDTAVYYCARMGPYGSGTEDY | |
| | | | | | | | | | WGQGTLVTVSS | |
| mAb-58 | Ab | SARS-CoV1, | 229E, | | | S; Unk | B-cells; SARS-CoV1 | 925 | QVQLVQSGGNVVQPGGSLRLSCVGSEF | 1992 |
| | | SARS-CoV2 | HKU1, | | | | Human Patient | | SITFFAMQWVRRTPGKGLEWVALVSHD | |
| | | | NL63, | | | | | | GSNIRYSDSVKGRFIISRDNAKNTLYLQL | |
| | | | OC43 | | | | | | DSLTPEDTGIYYCARDHALQNGRPGYFD | |
| | | | | | | | | | SWGQGSQVTVSS | |
| mAb-59 | Ab | SARS-CoV1, | 229E, | | | S; Unk | B-cells; SARS-CoV1 | 926 | QVQLVQSGGGLVQPGGSLRLSCSASGF | 1993 |
| | | SARS-CoV2 | HKU1, | | | | Human Patient | | TFNTYAMHWVRQAPGKRLEYVSSITRD | |
| | | | NL63, | | | | | | GAGKFYADSVKGRFTISRDNSKNTLYQQ | |
| | | | OC43 | | | | | | MSSLRPEDTAVYYCVREGQQWLGLYFD | |
| | | | | | | | | | HWGQGALVTVSS | |
| mAb-6 | Ab | SARS-CoV1, | 229E, | | | S; Unk | B-cells; SARS-CoV1 | 927 | QVQLVQSGAEVKKPGASVKVSCRASGY | 1994 |
| | | SARS-CoV2 | HKU1, | | | | Human Patient | | TFSGYDINWVRQATGQGLEWMGWM | |
| | | | NL63, | | | | | | NPNSGDTGYAHKFQGRVTMTRNSSIST | |
| | | | OC43 | | | | | | AYMELSSLTSEDTAVYFCAREKKSFGPQY | |
| | | | | | | | | | YYGSGEDWGQGTLVTVSS | |
| mAb-60 | Ab | SARS-CoV1, | 229E, | | | S; Unk | B-cells; SARS-CoV1 | 928 | EVQLVQSGAEMKKPGESLKISCKGSGYS | 1995 |
| | | SARS-CoV2 | HKU1, | | | | Human Patient | | FPNYWIGWVRQMPGKGLEWMAIMW | |
| | | | NL63, | | | | | | PSDSDTRYSPSFQGQVTISADTSTSTVYL | |
| | | | OC43 | | | | | | QWGSLKASDTAMYYCVRQRYCSGGSCF | |
| | | | | | | | | | LFEDAFEIWGQGTMVTVSS | |
| mAb-61 | Ab | SARS-CoV2 | 229E, | | | S; Unk | B-cells; SARS-CoV1 | 929 | EVQLVESGGGLVQPGGSLRLSCAASGFI | 1996 |
| | | | HKU1, | | | | Human Patient | | FKNEPMNWIRQFPGKGLEWISNIRDNG | |
| | | | NL63, | | | | | | NDVYYADSVKGRFTVSRDNAKNSLYLQ | |
| | | | OC43, | | | | | | MNSLRDDDTALYYCVRDTDWAFDSWG | |
| | | | SARS- | | | | | | QGTLVTVSS | |
| | | | CoV1 | | | | | | | |
| mAb-62 | Ab | SARS-CoV2 | 229E, | | | S; Unk | B-cells; SARS-CoV1 | 930 | EVQLVESGPTLVKPTQTLTLTCTFSGFSLT | 1997 |
| | | | HKU1, | | | | Human Patient | | TRRQGVGWLRRPPGKALEWLALIYWD | |
| | | | NL63, | | | | | | DDKRYSPSLKSRLTITKDTSKNHVVLSLT | |
| | | | OC43, | | | | | | NVGPADTATYYCAHTSELPPRRPYAAFD | |
| | | | SARS- | | | | | | FWGQGTLVTVSS | |
| | | | CoV1 | | | | | | | |
| mAb-63 | Ab | SARS-CoV2 | 229E, | | | S; Unk | B-cells; SARS-CoV1 | 931 | EVQLLESGGGLVQPGGSLRLSCAASGFP | 1998 |
| | | | HKU1, | | | | Human Patient | | FSTDAMNWVRQAPGEGLEWVSTISDS | |
| | | | NL63, | | | | | | GRDTYYAASVRGRFTISRDNSKNTVYLQ | |
| | | | OC43, | | | | | | MNSLRVEDTAVYYCANTNFLDYWGQG | |
| | | | SARS- | | | | | | TLVTVSS | |
| | | | CoV1 | | | | | | | |
| mAb-64 | Ab | SARS-CoV1, | 229E, | | | S; Unk | B-cells; SARS-CoV1 | 932 | EVQLQESGPGLLKPSETLSLTCTVSGSPIA | 1999 |
| | | SARS-CoV2 | HKU1, | | | | Human Patient | | SNYWSWVRQPAGKGLEWIGRIDTSPTT | |
| | | | NL63, | | | | | | DYNPSLKSRVIMSVDTSTSQFSLKMSSVT | |
| | | | OC43 | | | | | | AADTAVYYCTRSFISFDSSGHPYYYYAMD | |
| | | | | | | | | | VWGQGTTVTVSS | |
| mAb-65 | Ab | SARS-CoV1, | 229E, | | | S; Unk | B-cells; SARS-CoV1 | 933 | QVQLVQSGAEVRKPGSSVKLSCRASGG | 2000 |
| | | SARS-CoV2 | HKU1, | | | | Human Patient | | TFHTYTVNWVRQAPGQGLEWLGGIIPIF | |
| | | | NL63, | | | | | | GTPTYAQRFQGKVSITADSSTNTVFMEL | |
| | | | OC43 | | | | | | TSLTSEDTAVYYCTRETGTDEFDFWGQG | |
| | | | | | | | | | ALVTVSS | |
| mAb-66 | Ab | SARS-CoV2 | 229E, | | | S; Unk | B-cells; SARS-CoV1 | 934 | EVQLVESGPGLVKPSGTLSLTCAVSGAS | 2001 |
| | | | HKU1, | | | | Human Patient | | VSSDHWWSWVRQSPGKGLEWIGEVY | |
| | | | NL63, | | | | | | HSGSTNYNPSLKSRVTISLDQSNNQFSLK | |
| | | | OC43, | | | | | | LTSVTAADTAIYYCATMWGGLCTASNCY | |
| | | | SARS- | | | | | | GNPMDVWGQGTTVTVSS | |
| | | | CoV1 | | | | | | | |

| | | | | | | SEQ | | SEQ | | |
|---|---|---|---|---|---|---|---|---|---|---|
| | | Heavy V | Heavy J | Light V | Light J | ID | | ID | | |
| Name | VL | Gene | Gene | Gene | Gene | NO.: | CDRH3 | NO.: | CDRL3 | Sources |
| mAb-54 | DIRVTQSPSSLSATVGDRVTITCRASQT | IGHV3- | IGHJ3 | IGKV1-39 | IGKJ5 | 3027 | VKDLGATVTY | 4217 | QQTYITPG | Anna Wec et al., 2020 |
| | ITKYLNWYQQKPGKAPKLLLYGASSLQ | 64D | (Human) | (Human) | (Human) | | DVFDV | | T | (https://science.science |
| | SGVPSRFSGSGSGTDFTLTISSLQPEDF | (Human) | | | | | | | | mag.org/content/early/ |
| | ATYYCQQTYITPGTFGQGTRLEIK | | | | | | | | | 2020/06/15/science.abc |
| | | | | | | | | | | 7424) |
| mAb-55 | DIRLTQSPDSLALSLGERATINCKSSQS | IGHV3-23 | IGHJ4 | IGKV4-1 | IGKJ1 | 3028 | AKERDLPGRG | 4218 | QQYYLTP | Anna Wec et al., 2020 |
| | VLFSSNNNNYLGWYQQKPGQPPKLLI | (Human) | (Human) | (Human) | (Human) | | GYFDH | | WT | (https://science.science |
| | YWASTRESGVPDRFSGSGSGTDFTLTI | | | | | | | | | mag.org/content/early/ |
| | SSLQAEDVAVYYCQQYYLTPWTFGQG | | | | | | | | | 2020/06/15/science.abc |
| | TKVDIK | | | | | | | | | 7424) |
| mAb-56 | QPVLTQPASVSGSPGQSITISCTGTSSD | IGHV4-34 | IGHJ5 | IGLV2-23 | IGLJ3 | 3029 | ARGYTAPIIR | 4219 | CSYAVSGT | Anna Wec et al., 2020 |
| | VGNYNVVSWYQQHPGKAPQLFIYED | (Human) | (Human) | (Human) | (Human) | | EVPITFRPRW | | VL | (https://science.science |
| | TKRPSGVSDRFSGSKSGITASLTISRLQ | | | | | | FDP | | | mag.org/content/early/ |
| | PEDEADYYCCSYAVSGTVLFGGGTKVT | | | | | | | | | 2020/06/15/science.abc |
| | VL | | | | | | | | | 7424) |
| mAb-57 | EIVLTQSPGTLSVSPGERATLSCRASQII | IGHV3-11 | IGHJ4 | IGKV3-20 | IGKJ3 | 3030 | ARMGPYGSG | 4220 | LQYSLATT | Anna Wec et al., 2020 |
| | NRSQLGWYQHKPGQAPRLLIFDSSKR | (Human) | (Human) | (Human) | (Human) | | TFDY | | | (https://science.science |
| | ATGTPDRFSASGSETDFTLTISGVEPED | | | | | | | | | mag.org/content/early/ |
| | SGVYYCLQYSLATTFGPGTKVDIK | | | | | | | | | 2020/06/15/science.abc |
| | | | | | | | | | | 7424) |
| mAb-58 | DIQLTQSPATLSLSPGERATLSCRASPS | IGHV3-30 | IGHJ5 | IGKV3-11 | IGKJ3 | 3031 | ARDHALQNG | 4221 | QQRSDGY | Anna Wec et al., 2020 |
| | VFTFLAWYQQRPGQPPRLLIHDVSNR | (Human) | (Human) | (Human) | (Human) | | RPGYFDS | | N | (https://science.science |
| | APGIPARFSGSGSGTDFTLIISSLEPDDS | | | | | | | | | mag.org/content/early/ |
| | AVYFCQQRSDGYNFGPGTKVDIK | | | | | | | | | 2020/06/15/science.abc |
| | | | | | | | | | | 7424) |
| mAb-59 | DIRVTQSPSSLSASVGDRVTITCRASQT | IGHV3-64 | IGHJ4 | IGKV1-39 | IGKJ1 | 3032 | VREGQQWLG | 4222 | QQTYITPT | Anna Wec et al., 2020 |
| | INNYLNWYQQKPGKAPNLLIYAASTLQ | (Human) | (Human) | (Human) | (Human) | | LYFDH | | WT | (https://science.science |
| | NGVPSRFSGSGSGTDFTLTISSVQPED | | | | | | | | | mag.org/content/early/ |
| | FATYYCQQTYITPTWTFGQGTKVEIK | | | | | | | | | 2020/06/15/science.abc |
| | | | | | | | | | | 7424) |
| mAb-6 | EIVMTQSPSSLSASVGDRVTITCRASQS | IGHV1-8 | IGHJ4 | IGKV1-39 | IGKJ3 | 3033 | AREKKSFGPQ | 4223 | QQSYSTPY | Anna Wec et al., 2020 |
| | ISNYLYWYQQKPGKAPKLLIYVASNLQ | (Human) | (Human) | (Human) | (Human) | | YYYGSGED | | N | (https://science.science |
| | SGVPSRFSGSGSGTDFTLTISSLQPEDF | | | | | | | | | mag.org/content/early/ |
| | ATYYCQQSYSTPYNFGQGTKVDIK | | | | | | | | | 2020/06/15/science.abc |
| | | | | | | | | | | 7424) |
| mAb-60 | EIVLTQSPSTLSASVGDRVTITCRASQN | IGHV5-51 | IGHJ3 | IGKV1-5 | IGKJ3 | 3034 | VRQRYCSGGS | 4224 | QQYNSQY | Anna Wec et al., 2020 |
| | VNNWLAWYQQKPGKAPKLLIYEASTL | (Human) | (Human) | (Human) | (Human) | | CFLFEDAFEI | | T | (https://science.science |
| | KSGVPSRFSGSGSGTEFTLTISSLQPDD | | | | | | | | | mag.org/content/early/ |
| | FATYYCQQYNSQYTFGQGTKVDIK | | | | | | | | | 2020/06/15/science.abc |
| | | | | | | | | | | 7424) |
| mAb-61 | QPVLTQPRSVSGSPGQSVTISCTGSSST | IGHV3-48 | IGHJ5 | IGLV2-11 | IGLJ3 | 3035 | VRDTDWAFD | 4225 | CSSPGTIT | Anna Wec et al., 2020 |
| | FGTDNHISWYQQLPGKVPKLIIHAVSQ | (Human) | (Human) | (Human) | (Human) | | S | | WV | (https://science.science |
| | RPSVVPDRFSGSRSGNTASLTISGLQA | | | | | | | | | mag.org/content/early/ |
| | EDEADYYCCSSPGTITWVFGGGTKVT | | | | | | | | | 2020/06/15/science.abc |
| | VL | | | | | | | | | 7424) |
| mAb-62 | QSVLTQPPSVSGVPRQKVTISCSGSTA | IGHV2-5 | IGHJ4 | IGLV1-36 | IGLJ3 | 3036 | AHTSELPPRR | 4226 | ATWDDILN | 2020/06/15/science.abc |
| | NIASNGVNWYQLVPGKAPRLLISYDDL | (Human) | (Human) | (Human) | (Human) | | PYAAFDF | | GPV | Anna Wec et al., 2020 |
| | VPSGVSARFSGSKSGTSASLAISGLQAE | | | | | | | | | (https://science.science |
| | DEADYYCATWDDILNGPVFGGGTKLT | | | | | | | | | mag.org/content/early/ |
| | VL | | | | | | | | | 7424) |
| mAb-63 | DIVLTQSPLSLPVTLGQSASISCRSSQG | IGHV3-23 | IGHJ4 | IGKV2-30 | IGKJ2 | 3037 | ANTNFLDY | 4227 | MQATHW | Anna Wec et al., 2020 |
| | LVHSDGNIYLNWFQQRPGQSPRRLIY | (Human) | (Human) | (Human) | (Human) | | | | PRA | (https://science.science |
| | KVSNRDSGVPDRFSGSGSGTDFTLKIS | | | | | | | | | mag.org/content/early/ |
| | RVEAEDVGLYYCMQATHWPRAFGQ | | | | | | | | | 2020/06/15/science.abc |
| | GTKLEIK | | | | | | | | | 7424) |
| mAb-64 | EIVMTQSPGTLSLSPGERVTLSCRATQ | IGHV4-4 | IGHJ6 | IGKV3-20 | IGKJ1 | 3038 | TRSFISFDSS | 4228 | HQYGSSP | Anna Wec et al., 2020 |
| | SVSNNHLAWYQQKPGQAPRLLIYGAS | (Human) | (Human) | (Human) | (Human) | | GHPYYYYAMD | | WT | (https://science.science |
| | TTATDIPDRFSGRVAGTDFTLTISRLDP | | | | | | V | | | mag.org/content/early/ |
| | EDFAVYYCHQYGSSPWTFGQGTKVEI | | | | | | | | | 2020/06/15/science.abc |
| | K | | | | | | | | | 7424) |
| mAb-65 | DIRLTQSPATLSLSPGERATLSCRASQS | (Human) | IGHJ4 | IGKV3-11 | IGKJ1 | 3039 | TRETGTDEFD | 4229 | QHRSNWP | Anna Wec et al., 2020 |
| | VSSSLAWYQQKPGQAPRLLIYEASNRA | IGHV1-69 | (Human) | (Human) | (Human) | | F | | PRYT | (https://science.science |
| | TGVPARFSGSGSGTDFTLAISSLEPEDF | | | | | | | | | mag.org/content/early/ |
| | AVYYCQHRSNWPPRYTFGQGTKVEIK | | | | | | | | | 2020/06/15/science.abc |
| | | | | | | | | | | 7424) |
| mAb-66 | SYELTQPPSVSVSPGQTARITCSGDALP | IGHV4-4 | IGHJ6 | IGLV3-10 | IGLJ6 | 3040 | ATMWGGLCT | 4230 | YSTDSTAN | Anna Wec et al., 2020 |
| | RRYAYWYQQRSGQAPVLVIYEDNKRP | (Human) | (Human) | (Human) | (Human) | | ASNCYGNPM | | YKV | (https://science.science |
| | SGIPERFSAFSSGTRATLTISGAQVEDE | | | | | | DV | | | mag.org/content/early/ |
| | ADYYCYSTDSTANYKVFGGGTKVTVL | | | | | | | | | 2020/06/15/science.abc |
| | | | | | | | | | | 7424) |

| | | | | | Not | | | | | |
|---|---|---|---|---|---|---|---|---|---|---|
| | Ab | | | Neutral- | Neutral- | | | SEQ | | SEQ |
| | or | | Doesn't | ising | ising | Protein + | | ID | | ID |
| Name | Nb | Binds to | Bind to | Vs | Vs | Epitope | Origin | NO.: | VH or VHH | NO.: |
| mAb-67 | Ab | SARS-CoV2 | 229E, | | | S; Unk | B-cells; SARS-CoV1 | 935 | EVQLVESGPGLVKPSGTLSLTCAVTGAS | 2002 |
| | | | HKU1, | | | | Human Patient | | VSSDHWWSWVRQSPGKGLEWIGEVY | |
| | | | NL63, | | | | | | HSGSTNYNPSLKSRVTISLDQSNNQFSLK | |
| | | | OC43 | | | | | | LTSVTAADTAIYYCATMWGGLCTASNCY | |
| | | | SARS- | | | | | | GNPMDVWGQGTTVTVSS | |
| | | | CoV1 | | | | | | | |
| mAb-68 | Ab | SARS-CoV1, | 229E, | | | S; Unk | B-cells; SARS-CoV1 | 936 | QVQLQESGPGLVKPSGTLSLTCAVSGAS | 2003 |
| | | SARS-CoV2 | HKU1, | | | | Human Patient | | VSSDHWWSWVRQSPGKGLEWIGEVY | |
| | | | NL63, | | | | | | HSGSTNYNPSLKSRVTISLDQSNNQFSLK | |
| | | | OC43 | | | | | | LTSVTAADTAIYYCATMWGGLCTASNCY | |
| | | | | | | | | | GNPMDVWGQGTTVTVSS | |
| mAb-69 | Ab | SARS-CoV1, | 229E, | | | S; Unk | B-cells; SARS-CoV1 | 937 | QVQLQESGGGLVQPGGSLRLSCEASGF | 2004 |
| | | SARS-CoV2 | HKU1, | | | | Human Patient | | SFSDFVMHWVRQVPGKGLEWVSRISH | |
| | | | NL63, | | | | | | DGSITSYVDSVKGRFTVSRDNGKKTLYL | |
| | | | OC43 | | | | | | QMNSPRTEDTAVYYCARDLAWTFFDY | |
| | | | | | | | | | WGHGTLVTVSS | |
| mAb-7 | Ab | SARS-Cov1, | 229E, | | | S; Unk | B-cells; SARS-CoV1 | 938 | EVQLLESGGGLSRPGGSLRLSCAASGFIA | 2005 |
| | | SARS-CoV2 | HKU1, | | | | Human Patient | | SRNCMQWVRQAPGKGLEWVSIICGDEI | |
| | | | NL63, | | | | | | TYIRDSVKGRFTISRDDSKNTLHLEMNSL | |
| | | | OC43 | | | | | | RADDTAVYYCARATPPGGTTGWPYIDL | |
| | | | | | | | | | WGQGTLVTVSS | |
| mAb-70 | Ab | 229E, HKU1 | OC43 | | | S; Unk | B-cells; SARS-CoV1 | 939 | EVQLLESGGGLVQPGGSLRLSCAASGFP | 2006 |
| | | (weak), | | | | | Human Patient | | FSTDAMNWVRQAPGEGLEWVSTISDT | |
| | | NL63, SARS- | | | | | | | GRDTYYAASVKGRFTISRDNSKNTVYLQ | |
| | | CoV1 | | | | | | | MNSLRAEDTAVYYCANTNFLDYWGQG | |
| | | (weak), | | | | | | | TLVTVSS | |
| | | SARS-CoV2 | | | | | | | | |
| mAb-71 | Ab | SARS-CoV2 | 229E, | | | S; Unk | B-cells; SARS-CoV1 | 940 | EVQLVESGGGLVQPGRSLRLSCAASGFIL | 2007 |
| | | | HKU1, | | | | Human Patient | | DDYAVHWVRLAPGKGLEWVSGITWNS | |
| | | | NL63, | | | | | | GYLGYADSVKGRFTISRDNAKNSLYLQM | |
| | | | OC43 | | | | | | NSLRPEDTALYYCAKLGTDHPIGVDVW | |
| | | | SARS- | | | | | | GQGTTVTVSS | |
| | | | CoV1 | | | | | | | |
| mAb-72 | Ab | SARS-CoV2 | 229E, | | | S; Unk | B-cells; SARS-CoV1 | 941 | QVQLVQSGGGLVQPGGSLRLSCSASGF | 2008 |
| | | | HKU1, | | | | Human Patient | | TFNTYTMHWVRQAPGKGLEYVSAISSN | |
| | | | NL63, | | | | | | GVVTYYADSVKGRFTISRDNSKNTLYLQ | |
| | | | OC43 | | | | | | MSSLRAEDTAVYYCVKALYSSSWCPFDY | |
| | | | SARS- | | | | | | WGQGALVTVSS | |
| | | | CoV1 | | | | | | | |
| mAb-73 | Ab | SARS-CoV2 | 229E, | | | S; Unk | B-cells; SARS-CoV1 | 942 | QVQLQQSGGGLVQPGGSLRLSCEASGF | 2009 |
| | | | HKU1, | | | | Human Patient | | NFNSYSMSWVRQAPGKGLEWLSYISSR | |
| | | | NL63, | | | | | | SSTIKYASSVQGRFTVSRDNAKKSVFLQ | |
| | | | OC43 | | | | | | MNSLRDEDTAVYYCARELDSETYYNYNS | |
| | | | SARS- | | | | | | LDVWGQGTTVTVSS | |
| | | | CoV1 | | | | | | | |
| mAb-74 | Ab | SARS-CoV2 | 229E, | | | S; Unk | B-cells; SARS-CoV1 | 943 | QVQLQESGPGLVRPSETLSLTCTVSRGSI | 2010 |
| | | | HKU1, | | | | Human Patient | | SSSYWSWIRQPPGKGLEWIGFMYYSGS | |
| | | | NL63, | | | | | | TNYNPSLKSRVTISLDTSKNQFSLKLSSVT | |
| | | | OC43 | | | | | | AADTAVYYCAKAQGIYYRGWSYWFDP | |
| | | | SARS- | | | | | | WGQGTLVTVSS | |
| | | | CoV1 | | | | | | | |
| mAb-75 | Ab | 229E, HKU1 | OC43 | | | S; Unk | B-cells; SARS-CoV1 | 944 | EVQLVQSGAEVKKPGASVKISCKASGYA | 2011 |
| | | (weak), | | | | | Human Patient | | FRNNYINWIRQAPGQGLEWMGIINPSA | |
| | | NL63, SARS- | | | | | | | GTSTYAQKFQGRVTMTRDTSTNTVYME | |
| | | CoV1 | | | | | | | ITSLRSEDTATYFCAREARRQVTQWFGE | |
| | | (weak), | | | | | | | FWGPYNWFDPWGQGTLVTVSS | |
| | | SARS-CoV2 | | | | | | | | |
| mAb-76 | Ab | SARS-CoV1, | 229E, | | | S; Unk | B-cells; SARS-CoV1 | 945 | QVQLQQWGAGLLKPSETLSLTCGVYGV | 2012 |
| | | SARS-CoV2 | HKU1, | | | | Human Patient | | SFSDYYWSWIRQPPGKGLEWIGEINHS | |
| | | | NL63, | | | | | | GITNYNPSLKSRVTISVDTSKNQFSLKLSS | |
| | | | OC43 | | | | | | VTAADTAVYYCARGLISYTLWLRESYFDY | |
| | | | | | | | | | WGQGTLVTVSS | |
| mAb-77 | Ab | SARS-CoV1, | 229E, | | | S; Unk | B-cells; SARS-CoV1 | 946 | QVQLVQSGAEVKKPGSSVKVSCKASGG | 2013 |
| | | SARS-CoV2 | HKU1, | | | | Human Patient | | SLRDYAISWVRQAPGQGPEWMGGIMP | |
| | | | NL63, | | | | | | IFGTAGYAQKFQGRVKFTADESATTAYM | |
| | | | OC43 | | | | | | ELTGLRSEDSAVYFCARDPSILNTGNHH | |
| | | | | | | | | | WYDLDIWGQGTTVTVSS | |
| mAb-78 | Ab | SARS-CoV2 | 229E, | | | S; Unk | B-cells; SARS-CoV1 | 947 | QVQLVQSGAEVKKPGASVKVSCKASGY | 2014 |
| | | | HKU1, | | | | Human Patient | | TFTNDGFVWVRQAPGQVPEWMGWIS | |
| | | | NL63, | | | | | | VHTGDTIYAQRFQGRVTMTTDTSTRTSY | |
| | | | OC43 | | | | | | MELMSLRSDDTAVYYCARDYGDGPPD | |
| | | | SARS- | | | | | | HWGQGTLVTVSS | |
| | | | CoV1 | | | | | | | |
| mAb-79 | Ab | SARS-CoV1, | 229E, | | | S; Unk | B-cells; SARS-CoV1 | 948 | QVQLVQSGPEVKKPGSSVRVSCKVSGG | 2015 |
| | | SARS-CoV2 | HKU1, | | | | Human Patient | | PFSSYGVSWARQAPEKGLEWMGGVLPI | |
| | | | NL63, | | | | | | FGTVGYVHKFQGRVTITADESTSTVYMA | |
| | | | OC43 | | | | | | LSSLRSEDTAVYYCVLDTTMSHPHNWY | |
| | | | | | | | | | GMDVWGHGTTVTVSS | |

| | | | | | | SEQ | | SEQ | | |
|---|---|---|---|---|---|---|---|---|---|---|
| | | Heavy V | Heavy J | Light V | Light J | ID | | ID | | |
| Name | VL | Gene | Gene | Gene | Gene | NO.: | CDRH3 | NO.: | CDRL3 | Sources |
| mAb-67 | SYELTQPPSVSVSPGQTARITCSGDALP | IGHV4-4 | IGHJ6 | IGLV3-10 | IGLJ3 | 3041 | ATMWGGLCT | 4231 | YSTDSTAN | Anna Wec et al., 2020 |
| | RRYAYWYQQRSGQAPVLVIYEDNKRP | (Human) | (Human) | (Human) | (Human) | | ASNCYGNPM | | YKV | (https://science.science |
| | SGIPERFSAFSSGTRATLTISGAQVEDE | | | | | | DV | | | mag.org/content/early/ |
| | ADYYCYSTDSTANYKVFGGGTKLTVL | | | | | | | | | 2020/06/15/science.abc |
| | | | | | | | | | | 7424) |
| mAb-68 | SYELTQPPSVSVSPGQTARITCSGDALP | IGHV4-4 | IGHJ6 | IGLV3-10 | IGLJ3 | 3042 | ATMWGGLCT | 4232 | YSTDSTAN | Anna Wec et al., 2020 |
| | RRYAYWYQQRSGQAPVLVIYEDNKRP | (Human) | (Human) | (Human) | (Human) | | ASNCYGNPM | | YKV | (https://science.science |
| | SGIPERFSAFSSGTRATLTISGAQVEDE | | | | | | DV | | | mag.org/content/early/ |
| | ADYYCYSTDSTANYKVFGGGTKLTVL | | | | | | | | | 2020/06/15/science.abc |
| | | | | | | | | | | 7424) |
| mAb-69 | QSVLTQPSSLSASPGASASLTCTLHSGF | IGHV3-74 | IGHJ4 | IGLV5-45 | IGLJ3 | 3043 | ARDLAWTFF | 4233 | MIWHDNA | Anna Wec et al., 2020 |
| | NVGDHTINWYQQRPGSPPRYLLKYKS | (Human) | (Human) | (Human) | (Human) | | DY | | VV | (https://science.science |
| | DSDKEQGSGVPIRFSGSKDASANAGFL | | | | | | | | | mag.org/content/early/ |
| | LISGLRSEDEADYYCMIWHDNAVVFG | | | | | | | | | 2020/06/15/science.abc |
| | GGTKLTVL | | | | | | | | | 7424) |
| mAb-7 | EIVLTQSPATLSVSPGDGASLSCRASQS | IGHV3-66 | IGHJ4 | IGKV3-15 | IGKJ4 | 3044 | ARATPPGGTT | 4234 | HQYNTWP | Anna Wec et al., 2020 |
| | VGSNLAWYQQKPGQAPRLLISDASAR | (Human) | (Human) | (Human) | (Human) | | GWPYIDL | | PLT | (https://science.science |
| | ATGVPARFTGSGSGTDFTLTISSLQSED | | | | | | | | | mag.org/content/early/ |
| | FAVYYCHQYNTWPPLTFGGGTKLEIK | | | | | | | | | 2020/06/15/science.abc |
| | | | | | | | | | | 7424) |
| mAb-70 | EIVMTQSPLSLPVTLGQSASISCRSSQG | IGHV3-23 | IGHJ4 | IGKV2-30 | IGKJ3 | 3045 | ANTNFLDY | 4235 | MQATHW | Anna Wec et al., 2020 |
| | LVHSDGNIYLNWFQQRPGQSPRRLIY | (Human) | (Human) | (Human) | (Human) | | | | PRA | (https://science.science |
| | KVSNRDSGVPDRFSGSGSGTDFTLKIS | | | | | | | | | mag.org/content/early/ |
| | RVEAEDVGLYYCMQATHWPRAFGQ | | | | | | | | | 2020/06/15/science.abc |
| | GTKVDIK | | | | | | | | | 7424) |
| mAb-71 | DIVMTQSPLALSVTPGQPASISCKSSQ | IGHV3-9 | IGHJ6 | IGKV2D-29 | IGKJ5 | 3046 | AKLGTDHPIG | 4236 | MQSIQVPI | Anna Wec et al., 2020 |
| | SLLHSDGKTYFYWYLQKPGQSPHLLIY | (Human) | (Human) | (Human) | (Human) | | VDV | | T | (https://science.science |
| | EVSNRFSGVPDRFSGSGSGTDFTLKISR | | | | | | | | | mag.org/content/early/ |
| | VEAEDVGVYYCMQSIQVPITFGGGTK | | | | | | | | | 2020/06/15/science.abc |
| | LEIK | | | | | | | | | 7424) |
| mAb-72 | DIVMTQSPATLSVSPGERATLSCRASQ | IGHV3- | IGHJ4 | IGKV3-15 | IGKJ3 | 3047 | VKALYSSSWC | 4237 | QQYNLWP | Anna Wec et al., 2020 |
| | SVSSNLAWYQQKPGQAPRLLIYGAST | 64D | (Human) | (Human) | (Human) | | PFDY | | YT | (https://science.science |
| | RATNIPARFSGSGSGTEFTLTISSLQSE | (Human) | | | | | | | | mag.org/content/early/ |
| | DFAVYYCQQYNLWPYTFGQGTKVDIK | | | | | | | | | 2020/06/15/science.abc |
| | | | | | | | | | | 7424) |
| mAb-73 | EIVLTQSPSSLSASVGDRVTISCRASQGI | IGHV3-48 | IGHJ6 | IGKV1-16 | IGKJ2 | 3048 | ARELDSETYY | 4238 | KQYNSYPY | Anna Wec et al., 2020 |
| | STFLAWFQQRPGKAPKSLIYAASKLQS | (Human) | (Human) | (Human) | (Human) | | NYNSLDV | | T | (https://science.science |
| | GVPSRFSGSDSGPDFTLTIDNLQPEDS | | | | | | | | | mag.org/content/early/ |
| | ATYYCKQYNSYPYTFGQGTKLEIK | | | | | | | | | 2020/06/15/science.abc |
| | | | | | | | | | | 7424) |
| mAb-74 | QSVVTQPPSVSAAPGQKVTISCSGSSS | IGHV4-59 | IGHJ5 | IGLV1-51 | IGLJ3 | 3049 | AKAQGIYYRG | 4239 | ETWDDSLS | Anna Wec et al., 2020 |
| | NIGNNYVSWYQQLPGTAPKLLIYDSD | (Human) | (Human) | (Human) | (Human) | | WSYWFDP | | AVV | (https://science.science |
| | KRPSGIPERFSGSKSATSATLGITGLQT | | | | | | | | | mag.org/content/early/ |
| | GDEADYYCETWDDSLSAVVFGGGTKL | | | | | | | | | 2020/06/15/science.abc |
| | TVL | | | | | | | | | 7424) |
| mAb-75 | DIVLTQSPLSLSVTPGQPASISCRSSQSL | IGHV1-46 | IGHJ5 | IGKV2D-29 | IGKJ5 | 3050 | AREARRQVT | 4240 | MQSIQTPI | Anna Wec et al., 2020 |
| | QHTDGKTYLYWYLQKPGQSPQLLIYEL | (Human) | (Human) | (Human) | (Human) | | QWFGEFWG | | T | (https://science.science |
| | FNRFSGVPERFSGSGSGTDFTLKISRVE | | | | | | PYNWFDP | | | mag.org/content/early/ |
| | AEDVGIYYCMQSIQTPITFGQGTRLEIK | | | | | | | | | 2020/06/15/science.abc |
| | | | | | | | | | | 7424) |
| mAb-76 | DIRVTQSPDSLAVSLGERATINCKSSQS | IGHV4-34 | IGHJ4 | IGKV4-1 | IGKJ4 | 3051 | ARGLISYTLW | 4241 | QQYYSTPP | Anna Wec et al., 2020 |
| | VLYSSNNKNYLAWYQQKIGQPPKLLIY | (Human) | (Human) | (Human) | (Human) | | LRESYFDY | | T | (https://science.science |
| | WASIRESGVPDRFTGSGSGTDFTLTISS | | | | | | | | | mag.org/content/early/ |
| | LQAEDVAVYYCQQYYSTPPTFGGGTK | | | | | | | | | 2020/06/15/science.abc |
| | LEIK | | | | | | | | | 7424) |
| mAb-77 | EIVMTQTPLSLPVTLGQPASISCRSSQF | IGHV1-69 | IGHJ6 | IGKV2-30 | IGKJ1 | 3052 | ARDPSILNTG | 4242 | MQATEWP | Anna Wec et al., 2020 |
| | VSHTDGNTYLNWFQQRPGQSPRRLIY | (Human) | (Human) | (Human) | (Human) | | NHHWYDLDI | | RT | (https://science.science |
| | KVSKRDSGVPDRFSGSGSGTDFTLTIS | | | | | | | | | mag.org/content/early/ |
| | RVEAEDVGVYYCMQATEWPRTFGQG | | | | | | | | | 2020/06/15/science.abc |
| | TKVEYQ | | | | | | | | | 7424) |
| mAb-78 | DIVMTQSPDSLAVSLGERATINCKSSQ | IGHV1-18 | IGHJ4 | IGKV4-1 | IGKJ3 | 3053 | ARDYGDGPP | 4243 | QQYYTTPL | Anna Wec et al., 2020 |
| | SVLFSSNNKNYLAWYQQKPGLPPKLLI | (Human) | (Human) | (Human) | (Human) | | DH | | FT | (https://science.science |
| | YWASTRKSGVSDRFSGSGSGTDFTLTI | | | | | | | | | mag.org/content/early/ |
| | SSLQAEDVAVYYCQQYYTTPLFTFGPG | | | | | | | | | 2020/06/15/science.abc |
| | TKVDIK | | | | | | | | | 7424) |
| mAb-79 | DIVMTQSPLSLPVTLGQPASISCRSSHS | IGHV1-69 | IGHJ6 | IGKV2-30 | IGKJ3 | 3054 | VLDTTMSHP | 4244 | MQGTDW | Anna Wec et al., 2020 |
| | LVHTNGNTYLNWFQQRPGQPPRRLIY | (Human) | (Human) | (Human) | (Human) | | HNWYGMDV | | PRT | (https://science.science |
| | QVSNRDSGVPDRFSGSGSGTDFTLKIS | | | | | | | | | mag.org/content/early/ |
| | RVEADDVGIYYCMQGTDWPRTFGQG | | | | | | | | | 2020/06/15/science.abc |
| | TKVDIK | | | | | | | | | 7424) |

| | | | | | Not | | | | | |
|---|---|---|---|---|---|---|---|---|---|---|
| | Ab | | | Neutral- | Neutral- | | | SEQ | | SEQ |
| | or | | Doesn't | ising | ising | Protein + | | ID | | ID |
| Name | Nb | Binds to | Bind to | Vs | Vs | Epitope | Origin | NO.: | VH or VHH | NO.: |
| mAb-8 | Ab | SARS-CoV1, | 229E, | | | S; Unk | B-cells; SARS-CoV1 | 949 | QVQLVQSGAEVKKPGSSMKLSCKASGI | 2016 |
| | | SARS-CoV2 | HKU1, | | | | Human Patient | | NFRSYSFSWVRQAPGQGLEWMGGVIP | |
| | | | NL63, | | | | | | YFPTANYAEKFRGRVTATADESTGTVYLE | |
| | | | OC43 | | | | | | MSSLRSEDTAVYYCASEYFDGRSYHSFC | |
| | | | | | | | | | GLDVWGQGTLVTVSS | |
| mAb-80 | Ab | 229E, HKU1 | OC43 | | | S; Unk | B-cells; SARS-CoV1 | 950 | QVQLVQSGAEVKKPGSSVKVSCKASGG | 2017 |
| | | (weak), | | | | | Human Patient | | TLSDYAISWVRQAPGQGLEWMGGIMP | |
| | | NL63, SARS- | | | | | | | VFGSPGYAEIFQGRLTITADESRSTAYME | |
| | | CoV1 | | | | | | | LTSLRSEDTAVYYCARDPSILNTGPHHW | |
| | | (weak), | | | | | | | YDLDIWGPGTTVTVSS | |
| | | SARS-CoV2 | | | | | | | | |
| mAb-81 | Ab | SARS-CoV2 | 229E, | | | S; Unk | B-cells; SARS-CoV1 | 951 | EVQLVQSGAEVKKPGSSMRVSCRVSGG | 2018 |
| | | | HKU1, | | | | Human Patient | | TFITHAMSWVRQAPGQGPEWMGGIV | |
| | | | NL63, | | | | | | PLFGRASYAQPSQTRVQITADESTSTVYL | |
| | | | OC43, | | | | | | EVPSLTSEDTAVYYCVRDSEPYTATRSQN | |
| | | | SARS- | | | | | | HYWYDMDVWGQGTTVTVSS | |
| | | | CoV1 | | | | | | | |
| mAb-82 | Ab | HKU1, SARS- | 229E, | | | S; Unk | B-cells; SARS-CoV1 | 952 | EVQLVESGPGLVKPSATLSLTCTVSGGSI | 2019 |
| | | CoV1, SARS- | NL63, | | | | Human Patient | | NNYYWTWVRQSAGKGLEWIGRINTSG | |
| | | CoV2 | OC43 | | | | | | STNYNASLKSRVTMSIDTSKNEFSLRLSS | |
| | | | | | | | | | VTAADTAVYYCAREFGVRFLDRSLFGAM | |
| | | | | | | | | | DVWGHGATVTVSS | |
| mAb-83 | Ab | SARS-CoV2 | 229E, | | | S; Unk | B-cells; SARS-CoV1 | 953 | QVQLVESGGGVVQPGRSLRLSCAASGF | 2020 |
| | | | HKU1, | | | | Human Patient | | TFSAFAMHWVRQAPGKGLEWVTIISYD | |
| | | | NL63, | | | | | | GSNEYYADSVQGRFSISRDNSKNTLFLQ | |
| | | | OC43, | | | | | | MSSLRTEDTAIYYCARAGGYLSAFDIWG | |
| | | | SARS- | | | | | | QGTTVTVSS | |
| | | | CoV1 | | | | | | | |
| mAb-84 | Ab | SARS-CoV1, | 229E, | | | S; Unk | B-cells; SARS-CoV1 | 954 | EVQLVQSGAEVKKPGSSVKVSCKVSGGT | 2021 |
| | | SARS-CoV2 | HKU1, | | | | Human Patient | | FSNYAISWLRQAPGQGPEWMGGIIPAL | |
| | | | NL63, | | | | | | SKVGYAGKFQARLTFSADELKTTVYMDL | |
| | | | OC43 | | | | | | SSLTSEDTAVYYCARDPSFLNAGNHFYYD | |
| | | | | | | | | | FDVWGQGTMVTVSS | |
| mAb-85 | Ab | SARS-CoV2 | 229E, | | | S; Unk | B-cells; SARS-CoV1 | 955 | QVQLQESGPGLVKPSGTLSLTCAVSGGS | 2022 |
| | | | HKU1, | | | | Human Patient | | ITSRDWWSWVRQPPGKGLEWIGEVYH | |
| | | | NL63, | | | | | | SGSTSYNPSLKSRVTISVDKSKNEFSLKLS | |
| | | | OC43, | | | | | | SVTAADTAVYYCARAGNIVVMPAAQYY | |
| | | | SARS- | | | | | | FDYWGQGTLVTVSS | |
| | | | CoV1 | | | | | | | |
| mAb-86 | Ab | SARS-CoV1, | 229E, | | | S; Unk | B-cells; SARS-CoV1 | 956 | EVQLVESGGSVVQPGTSLKLSCAGSAGL | 2023 |
| | | SARS-CoV2 | HKU1, | | | | Human Patient | | TITRYAMHWVRQAPGKGLEWVALVSH | |
| | | | NL63, | | | | | | DGIHIGYSDSVRGRFTISRDNSRNTLYLQ | |
| | | | OC43 | | | | | | MDGLRPEDTAVYYCVRDDVLQHSRPSG | |
| | | | | | | | | | PGYFVSWGQGTLVTVSS | |
| mAb-87 | Ab | SARS-CoV2 | 229E, | | | S; Unk | B-cells; SARS-CoV1 | 957 | QVQLQESGPGLVKPSETLSLTCTVSGGS | 2024 |
| | | | HKU1, | | | | Human Patient | | MNHYYWSWIRQPPGKGLEGIGYTYYSG | |
| | | | NL63, | | | | | | STNYNPSLKSRVTISVDASKNQFSLRLSSV | |
| | | | OC43, | | | | | | TAADTAVYYCARGSQIDLRGGLGATFFD | |
| | | | SARS- | | | | | | YWGQGTLVTVSS | |
| | | | CoV1 | | | | | | | |
| mAb-88 | Ab | SARS-CoV2 | 229E, | | | S; Unk | B-cells; SARS-CoV1 | 958 | QVQLVESGAEVKKPGSSVKISCKISGDTF | 2025 |
| | | | HKU1, | | | | Human Patient | | STNAISWLRQAPGREPEWMGGIVPLVG | |
| | | | NL63, | | | | | | PASYAQRPQGRLTITADEFTNTAYLELNS | |
| | | | OC43, | | | | | | LRSEDTATYYCARDSDPYTATRRHNHYW | |
| | | | SARS- | | | | | | YAMDVWGQGTTVTVSS | |
| | | | CoV1 | | | | | | | |
| mAb-89 | Ab | SARS-CoV1, | 229E, | | | S; Unk | B-cells; SARS-CoV1 | 959 | EVQLLESGGGLVQPGGSLRLSCAASGFIF | 2026 |
| | | SARS-CoV2 | HKU1, | | | | Human Patient | | KNEPMNWIRQFPGKGLEWISNIRDNG | |
| | | | NL63, | | | | | | NDVYYADSVKGRFTVSRDNAKNSLYLQ | |
| | | | OC43 | | | | | | MNSLRDDDTALYYCVRDTDWAFDSWG | |
| | | | | | | | | | QGTLVTVSS | |
| mAb-9 | Ab | SARS-CoV1, | 229E, | | | S; Unk | B-cells; SARS-CoV1 | 960 | QVQLVQSGAEVKKPGASVKVSCKASGY | 2027 |
| | | SARS-CoV2 | HKU1, | | | | Human Patient | | TFSSYDINWVRQATGQGLEWMGWMS | |
| | | | NL63, | | | | | | PNTGDTGYAHKFQGRVRMTSNTSISTA | |
| | | | OC43 | | | | | | YMELNSLTSEDTAVYYCARRGNNFGYYY | |
| | | | | | | | | | YYTVDVWGQGTTVTVSS | |
| mAb-90 | Ab | HKU1, SARS- | 229E, | | | S; Unk | B-cells; SARS-CoV1 | 961 | QVQLVQSGADVKKPGASVKVSCKASGY | 2028 |
| | | CoV1, SARS- | NL63, | | | | Human Patient | | TFTSYYMHWVRQAPGQGLEWLGVIHP | |
| | | CoV2 | OC43 | | | | | | SGGSTTFAQKFQGRVTMTRDTSTSTVY | |
| | | | | | | | | | MELSSLRSEDTAVYYCARVLAGSSHEW | |
| | | | | | | | | | QLTHDAFDIWGQGTTVTVSS | |

| | | | | | | SEQ | | SEQ | | |
|---|---|---|---|---|---|---|---|---|---|---|
| | | Heavy V | Heavy J | Light V | Light J | ID | | ID | | |
| Name | VL | Gene | Gene | Gene | Gene | NO.: | CDRH3 | NO.: | CDRL3 | Sources |
| mAb-8 | ETTLTQSPLSLPVTLGQPASISCRSSQG | IGHV1-69 | IGHJ4 | IGKV2-30 | IGKJ1 | 3055 | ASEYFDGRSY | 4245 | MQGTEW | Anna Wec et al., 2020 |
| | LAHSNGNTYLNWFHQRPGQSPRRLIY | (Human) | (Human) | (Human) | (Human) | | HSFCGLDV | | PRT | (https://science.science |
| | QVSNRDSGVPDRFSGSGSGTDFTLKIS | | | | | | | | | mag.org/content/early/ |
| | RVEAEDVGVYYCMQGTEWPRTFGQ | | | | | | | | | 2020/06/15/science.abc |
| | GTKVEIK | | | | | | | | | 7424) |
| mAb-80 | DIVMITQSPLSLPVSLGQPASISCRSSQS | IGHV1-69 | IGHJ6 | IGKV2-30 | IGKJ3 | 3056 | ARDPSILNTG | 4246 | MQGTEW | Anna Wec et al., 2020 |
| | VVHTDGNTYLNWYQQRPGQSPRRLIY | (Human) | (Human) | (Human) | (Human) | | PHHWYDLDI | | PRT | (https://science.science |
| | KVSNRDSGVPDRFSGSGSVTDFTLKIS | | | | | | | | | mag.org/content/early/ |
| | RVEAEDVAVYYCMQGTEWPRTFGQG | | | | | | | | | 2020/06/15/science.abc |
| | TKVDIK | | | | | | | | | 7424) |
| mAb-81 | DIQMTQSPLSLSVTLGQSASISCRASQT | IGHV1-69 | IGHJ6 | IGKV2-30 | IGKJ1 | 3057 | VRDSEPYTAT | 4247 | MQGTDW | Anna Wec et al., 2020 |
| | VVHSVDGNTYLNWFHQRPGQSPRRLI | (Human) | (Human) | (Human) | (Human) | | RSQNHYWYD | | PRT | (https://science.science |
| | YKVSNRDSGVPDRFSGSGSGTDFTLRI | | | | | | MDV | | | mag.org/content/early/ |
| | SRVEAEDIGIYYCMQGTDWPRTFGQG | | | | | | | | | 2020/06/15/science.abc |
| | TKVEIK | | | | | | | | | 7424) |
| mAb-82 | QPVLTQPASVSGSPGQSITISCTGTSSD | IGHV4-4 | IGHJ6 | IGLV2-14 | IGLJ1 | 3058 | AREFGVRFLD | 4248 | SSYTSSSTL | Anna Wec et al., 2020 |
| | VGSFNYVSWYQQHPGKAPKLVIYDVY | (Human) | (Human) | (Human) | (Human) | | RSLFGAMDV | | YV | (https://science.science |
| | NRPSGVSNRFSGSKSGNTASLTISGLQ | | | | | | | | | mag.org/content/early/ |
| | AEDEADYYCSSYTSSSTLYVFGTGTKVT | | | | | | | | | 2020/06/15/science.abc |
| | VL | | | | | | | | | 7424) |
| mAb-83 | DIRLTQSPSTLSASVGDRVTITCRASQSI | IGHV3-30 | IGHJ3 | IGKV1-5 | IGKJ1 | 3059 | ARAGGYLSAF | 4249 | QQYNSGW | Anna Wec et al., 2020 |
| | SSWLAWYQQKPGKAPNLLIYKASTLES | (Human) | (Human) | (Human) | (Human) | | DI | | T | (https://science.science |
| | GVPSRFSGSGSGTEFTLTISSLQPDDFA | | | | | | | | | mag.org/content/early/ |
| | TYYCQQYNSGWTFGQGTKVEIK | | | | | | | | | 2020/06/15/science.abc |
| | | | | | | | | | | 7424) |
| mAb-84 | DIRLTQSPLSLPVTLGQPASISCTSSQD | IGHV1-69 | IGHJ3 | IGKV2-30 | IGKJ3 | 3060 | ARDPSFLNAG | 4250 | MQGTDW | Anna Wec et al., 2020 |
| | VVHTDGNTYLNWFHQRPGQSPRRLIY | (Human) | (Human) | (Human) | (Human) | | NHFYYDFDV | | PRT | (https://science.science |
| | KVSNRDSGVPDRFSGSGSGSHFTLKIS | | | | | | | | | mag.org/content/early/ |
| | RVEAEDAGIYYCMQGTDWPRTFGQG | | | | | | | | | 2020/06/15/science.abc |
| | TKVDIK | | | | | | | | | 7424) |
| mAb-85 | EIVLTQSPSSLSASVGDRVTITCRASQDI | IGHV4-4 | IGHJ4 | IGKV1-9 | IGKJ3 | 3061 | ARAGNIVVM | 4251 | LQLHNYSS | Anna Wec et al., 2020 |
| | SNYLAWYQQKPGKAPKLLIYAASTLQS | (Human) | (Human) | (Human) | (Human) | | PAAQYYFDY | | | (https://science.science |
| | GVPLRFSGSGSGTDFTLTISSLQPEDFA | | | | | | | | | mag.org/content/early/ |
| | TYYCLQLHNYSSFGGGTKVDIK | | | | | | | | | 2020/06/15/science.abc |
| | | | | | | | | | | 7424) |
| mAb-86 | EIVLTQSPATLSLSPGERATLSCRASQS | IGHV3-30 | IGHJ5 | IGKV3-11 | IGKJ2 | 3062 | VRDDVLQHS | 4252 | QQRSDGY | Anna Wec et al., 2020 |
| | VSTFLGWYQQRPGQPPRLLIYDASYR | (Human) | (Human) | (Human) | (Human) | | RPSGPGYFVS | | N | (https://science.science |
| | APDIPVRFSGSGSGTDFTLTINSLEPED | | | | | | | | | mag.org/content/early/ |
| | SAVYYCQQRSDGYNFGPGTKLEIK | | | | | | | | | 2020/06/15/science.abc |
| | | | | | | | | | | 7424) |
| mAb-87 | QSVLTQPASVSGSPGQSITISCTGTSSD | IGHV4-59 | IGHJ4 | IGLV2-14 | IGLJ3 | 3063 | ARGSQIDLRG | 4253 | SSYTSTNTV | Anna Wec et al., 2020 |
| | VGAYNYVSWYQQHPGKAPKLTVYDV | (Human) | (Human) | (Human) | (Human) | | GLGATFFDY | | | (https://science.science |
| | RNRPSGVSNRFSGSKSGNTASLTISGL | | | | | | | | | mag.org/content/early/ |
| | QAEDEAHYYCSSYTSTNTVFGGGTKLT | | | | | | | | | 2020/06/15/science.abc |
| | VL | | | | | | | | | 7424) |
| mAb-88 | DIRLTQTPLSLPVTLGQPASISCRSSQIA | IGHV1-69 | IGHJ6 | IGKV2-24 | IGKJ3 | 3064 | ARDSDPYTAT | 4254 | MQGTDW | Anna Wec et al., 2020 |
| | MHSDGNTYLSWFHQRPGQPPRRLIYK | (Human) | (Human) | (Human) | (Human) | | RRHNHYWYA | | PRT | (https://science.science |
| | ISNRDSGVPDRFSGSGSGTDFTLKISRV | | | | | | MDV | | | mag.org/content/early/ |
| | EAEDIGTFYCMQGTDWPRTFGQGTK | | | | | | | | | 2020/06/15/science.abc |
| | VDIK | | | | | | | | | 7424) |
| mAb-89 | QSALIQPRSVSGSPGQSVTISCTGSSST | IGHV3-48 | IGHJ5 | IGLV2-11 | IGLJ3 | 3065 | VRDTDWAFD | 4255 | CSSPGTIT | Anna Wec et al., 2020 |
| | FGTDNHISWYQQLPGKVPKLIIHAVSQ | (Human) | (Human) | (Human) | (Human) | | S | | | (https://science.science |
| | RPSVVPDRFSGSRSGNTASLTISGLQA | | | | | | | | | mag.org/content/early/ |
| | EDEADYYCCSSPGTITWVFGGGTKVT | | | | | | | | | 2020/06/15/science.abc |
| | VL | | | | | | | | | 7424) |
| mAb-9 | DIRLTQSPSSLSASVGDRVTIACRASQS | IGHV1-8 | IGHJ6 | IGKV1-39 | IGKJ1 | 3066 | ARRGNNFGY | 4256 | QQCYSYPP | Anna Wec et al., 2020 |
| | VSNYLNWYQQKPGKAPKLLIYAASSLQ | (Human) | (Human) | (Human) | (Human) | | YYYYTVDV | | T | (https://science.science |
| | NGVPSRFGGSGSGTDFTLTISSLQPED | | | | | | | | | mag.org/content/early/ |
| | FATYYCQQCYSYPPTFGHGTKVEIK | | | | | | | | | 2020/06/15/science.abc |
| | | | | | | | | | | 7424) |
| mAb-90 | DIRMTQSPDSLAVSLGERATINCRTSQ | IGHV1-46 | IGHJ3 | IGKV4-1 | IGKJ3 | 3067 | ARVLAGSSHE | 4257 | QQYYSTPY | Anna Wec et al., 2020 |
| | SVLYSSNNKNYLGWYQQKPGQPPKLL | (Human) | (Human) | (Human) | (Human) | | WQLTHDAFD | | T | (https://science.science |
| | IYWASTRESGVPDRFSGSGSGTDFTLTI | | | | | | I | | | mag.org/content/early/ |
| | SSLQAEDVAVYYCQQYYSTPYTFGQGT | | | | | | | | | 2020/06/15/science.abc |
| | KVDIK | | | | | | | | | 7424) |

| | | | | | Not | | | | | |
|---|---|---|---|---|---|---|---|---|---|---|
| | Ab | | | Neutral- | Neutral- | | | SEQ | | SEQ |
| | or | | Doesn't | ising | ising | Protein + | | ID | | ID |
| Name | Nb | Binds to | Bind to | Vs | Vs | Epitope | Origin | NO.: | VH or VHH | NO.: |
| mAb-91 | Ab | HKU1 | 229E, | | | S; Unk | B-cells; SARS-CoV1 | 962 | EVQLLESGGGLVQPGGSLRLSCAASGFT | 2029 |
| | | (weak), | NL63, | | | | Human Patient | | FSSYAMSWVRQAPGKGLEWVSGIDGG | |
| | | SARS-CoV1 | OC43 | | | | | | GGSSYYADSVRGRFTVSRDNSKNMLHL | |
| | | (weak), | | | | | | | QMNSLRADDTAVYFCAKGDWIRYFDW | |
| | | SARS-CoV2 | | | | | | | SLPISFFDYWGQGALVTVSS | |
| mAb-92 | Ab | SARS-CoV1, | 229E, | | | S; Unk | B-cells; SARS-CoV1 | 963 | EVQLLESGPGLLKPSETLSLTCTVSGDSV | 2030 |
| | | SARS-CoV2 | HKU1, | | | | Human Patient | | SSGNFYWSWVRRPPGKALEWIAYSHYT | |
| | | | NL63, | | | | | | GGTNSDPSFMGRVTMSIDPSRNQFSLR | |
| | | | OC43 | | | | | | LTSVAAADTAVYYCARTTSPLTYSGHWP | |
| | | | | | | | | | LFDYWGQGSLVTVSS | |
| mAb-93 | Ab | SARS-CoV1, | 229E, | | | S; Unk | B-cells; SARS-CoV1 | 964 | QVQLVQSGDEMKKPGSSVKVSCKASGD | 2031 |
| | | SARS-CoV2 | HKU1, | | | | Human Patient | | TFSTHAISWVRQAPGQGPEWMGGIIPL | |
| | | | NL63, | | | | | | FGTASYAQTSQSRVKITADESTSTAYMEL | |
| | | | OC43 | | | | | | SSLTSEDTAVYYCVRDSDPYTATSRNNHY | |
| | | | | | | | | | WYGMDVWGQGTTVTVSS | |
| mAb-94 | Ab | SARS-CoV2 | 229E, | | | S; Unk | B-cells; SARS-CoV1 | 965 | QVQLVQSGAEVKKPGSSVKVSCKASGG | 2032 |
| | | | HKU1, | | | | Human Patient | | MFTDYAISWVRQAPGQRLEWMGGIM | |
| | | | NL63, | | | | | | PGLGSPAYAQIFRDRATISADVSTSTAYL | |
| | | | OC43, | | | | | | ELTSLKPEDTAVYYCARDPSILNTGNHH | |
| | | | SARS- | | | | | | WYDLDIWGQGTTVTVSS | |
| | | | CoV1 | | | | | | | |
| mAb-95 | Ab | SARS-CoV1, | 229E, | | | S; Unk | B-cells; SARS-CoV1 | 966 | QVQLVQSGAEVKKPGSSVKVSCKASGG | 2033 |
| | | SARS-CoV2 | HKU1, | | | | Human Patient | | MFTDYAISWVRQAPGQRPEWMGGIM | |
| | | | NL63, | | | | | | PGLGSPAYAQIFRGRATISADLSTSTAYLE | |
| | | | OC43 | | | | | | LTSLKPEDTAVYYCARDPSILNTGNHHW | |
| | | | | | | | | | YDLDIWGQGTMVTVSS | |
| mAb-96 | Ab | SARS-CoV2 | 229E, | | | S; Unk | B-cells; SARS-CoV1 | 967 | QVTLKESGGGLVQPGGSLRLSCAASGFT | 2034 |
| | | | HKU1, | | | | Human Patient | | VNSYGMSWVRQAPGKGLEWVSGFKSR | |
| | | | NL63, | | | | | | SDRPDYAESVKGRFTISRDTSKNTVYLE | |
| | | | OC43, | | | | | | MIGLRAEDTATYYCVRMDWMEWMKY | |
| | | | SARS- | | | | | | YFDSWGQGALVTVSS | |
| | | | CoV1 | | | | | | | |
| mAb-97 | Ab | SARS-CoV1 | 229E, | | | S; Unk | B-cells; SARS-CoV1 | 968 | QVQLVQSGAEVKKPGSSVKVSCKASGG | 2035 |
| | | (weak), | HKU1, | | | | Human Patient | | MISDYAISWVRQAPGQRLEWMGGIMP | |
| | | SARS-CoV2 | NL63, | | | | | | AFGSPGYAQIFRGRATISADVSTNTAYLE | |
| | | | OC43 | | | | | | LTSLNPDDTAVYYCARDPSILNTGNHHW | |
| | | | | | | | | | YDLDMWGQGTMVTVSS | |
| mAb-98 | Ab | SARS-CoV1, | 229E, | | | S; Unk | B-cells; SARS-CoV1 | 969 | QVQLVESGGSVVQPGTSLKLSCAGSAGL | 2036 |
| | | SARS-CoV2 | HKU1, | | | | Human Patient | | TITRYAMHWVRQAPGKGLEWVALVSH | |
| | | (weak) | NL63, | | | | | | DGIHIGYSDSVRGRFTISRDNSRNTLYLQ | |
| | | | OC43 | | | | | | MDGLRPEDTAVYYCVRDDVLQHSRPSG | |
| | | | | | | | | | PGYFVSWGQGTLVTVSS | |
| mAb-99 | Ab | SARS-CoV2 | 229E, | | | S; Unk | B-cells; SARS-CoV1 | 970 | QVQLQESGPGLVKPSGTLSLTCAVSGAS | 2037 |
| | | (weak) | HKU1, | | | | Human Patient | | VSSDHWWSWVRQSPGKGLEWIGEVY | |
| | | | NL63, | | | | | | HSGSTNYNPSLKSRVTISLDQSNNQFSLK | |
| | | | OC43, | | | | | | LTSVTAADTAIYYCATMWGGLCTASNCY | |
| | | | SARS- | | | | | | GNPMDVWGQGTTVTVSS | |
| | | | CoV1 | | | | | | | |
| mBG17 | Ab | SARS-CoV1, | 229E | | | N | Immunised Mouse | 971 | EVKLEESGGGLVQPGGSMKFSCVASGF | 2038 |
| | | SARS-CoV2, | | | | | | | TFSDYWMNWVRQSPDKGLEWVAEIRL | |
| | | NL63 | | | | | | | KSNNYATHYAASVKGRFTISRDDSKSSVY | |
| | | (weak) | | | | | | | LQMNNLRAEDSGIYYCTRSAMDYWGQ | |
| | | | | | | | | | GTSVTVSS | |
| mBG21 | Ab | SARS-CoV1, | 229E | | | N | Immunised Mouse | 972 | QIQLVQSGPELKKPGETVKISCKASGYTF | 2039 |
| | | SARS-CoV2, | | | | | | | TDYSMHWVKQAPGKGSKWMGWINTE | |
| | | NL63 | | | | | | | TGEPTYADDFKGRFAFSLETSASTAYLQI | |
| | | (weak) | | | | | | | NNLKNEDTATYFCALRRWGQGTLVTVS | |
| | | | | | | | | | S | |
| mBG22 | Ab | SARS-CoV1, | 229E | | | N | Immunised Mouse | 973 | QIQLVQSGPELKKPGETVKISCKASGYTF | 2040 |
| | | SARS-CoV2, | | | | | | | TDYSMHWVKQAPGKGSKWMGWINTE | |
| | | NL63 | | | | | | | TGEPTYADDFKGRFAFSLETSASTAYLQI | |
| | | (weak) | | | | | | | NNLKNEDTATYFCALRRWGQGTLVTVS | |
| | | | | | | | | | A | |
| mBG57 | Ab | SARS-CoV1, | 229E | | | N | Immunised Mouse | 974 | QIQLVQSGPELKKPGETVKISCKASGYTF | 2041 |
| | | SARS-CoV2, | | | | | | | TDYSMHWVKQAPGKGSKWMGWINTE | |
| | | NL63 | | | | | | | TGEPTYADDFKGRFAFSLETSASTAYLQI | |
| | | (weak) | | | | | | | NNLKNEDTATYFCALRRWGQGTLVTVS | |
| | | | | | | | | | A | |

| | | | | | | SEQ | | SEQ | | |
|---|---|---|---|---|---|---|---|---|---|---|
| | | Heavy V | Heavy J | Light V | Light J | ID | | ID | | |
| Name | VL | Gene | Gene | Gene | Gene | NO.: | CDRH3 | NO.: | CDRL3 | Sources |
| mAb-91 | QSALTQPASVSGSPGQSITISCTGTNSD | IGHV3-23 | IGHJ4 | IGLV2-14 | IGLJ3 | 3068 | AKGDWIRYF | 4258 | CSYTRTNT | Anna Wec et al., 2020 |
| | ISNSYSVSWYQQYPGKAPKLVIFDVIN | (Human) | (Human) | (Human) | (Human) | | DWSLPISFFD | | PVL | (https://science.science |
| | RPSGVSNRFSGSKSGNTASLTISGLQA | | | | | | Y | | | mag.org/content/early/ |
| | DDEADYYCCSYTRTNTPVLFGGGTKLT | | | | | | | | | 2020/06/15/science.abc |
| | VL | | | | | | | | | 7424) |
| mAb-92 | DIQLTQSPATLSVSPGERATLSCRASQS | IGHV4-61 | IGHJ4 | IGKV3-15 | IGKJ4 | 3069 | ARTTSPLTYSG | 4259 | QQYYSWP | Anna Wec et al., 2020 |
| | VTKHLAWYQQKPGQAPRLLIYGASTR | (Human) | (Human) | (Human) | (Human) | | HWPLFDY | | PLT | (https://science.science |
| | ATGVPARFSGSGSDTEFSLTISSLQSED | | | | | | | | | mag.org/content/early/ |
| | FAVYYCQQYYSWPPLTFGGGTKLEIK | | | | | | | | | 2020/06/15/science.abc |
| | | | | | | | | | | 7424) |
| mAb-93 | DIVMTQTPLSLPVTLGQPASISCRASQ | IGHV1-69 | IGHJ6 | IGKV2-30 | IGKJ3 | 3070 | VRDSDPYTAT | 4260 | MQGTDW | Anna Wec et al., 2020 |
| | TVVHTNGNTYLNWFHQRPGQSPRRLI | (Human) | (Human) | (Human) | (Human) | | SRNNHYWYG | | PRT | (https://science.science |
| | YEVSNRDSGVPDRFSGSGSGTDFTLSI | | | | | | MDV | | | mag.org/content/early/ |
| | SRVEAEDIGVYYCMQGTDWPRTFGP | | | | | | | | | 2020/06/15/science.abc |
| | GTKVEIK | | | | | | | | | 7424) |
| mAb-94 | DIQLTQSPLSLPVGLGQSASISCRSSQR | IGHV1-69 | IGHJ6 | IGKV2-30 | IGKJ2 | 3071 | ARDPSILNTG | 4261 | MQSTDWP | Anna Wec et al., 2020 |
| | VVHTDGNTYLNWYHQRPGQSPRRLIY | (Human) | (Human) | (Human) | (Human) | | NHHWYDLDI | | RT | (https://science.science |
| | KVSNRDSGVPDRFSGSGSGTDFTLRIS | | | | | | | | | mag.org/content/early/ |
| | RVEAEDVGVYYCMQSTDWPRTFGQG | | | | | | | | | 2020/06/15/science.abc |
| | TKLEIK | | | | | | | | | 7424) |
| mAb-95 | DIVLTQSPLSLPVGLGQSASISCRSSQR | IGHV1-69 | IGHJ3 | IGKV2-30 | IGKJ2 | 3072 | ARDPSILNTG | 4262 | MQGTEW | Anna Wec et al., 2020 |
| | VVHTDGNTYLHWFHQRPGQSPRRLIY | (Human) | (Human) | (Human) | (Human) | | NHHWYDLDI | | PRT | (https://science.science |
| | KVSNRDSGVPDRFSGSGSGTDFTLRIS | | | | | | | | | mag.org/content/early/ |
| | RVEAEDVGVYYCMQGTEWPRTFGQ | | | | | | | | | 2020/06/15/science.abc |
| | GTKLEIK | | | | | | | | | 7424) |
| mAb-96 | ETTLTQSPVTLSVSPGERATLSCRASQS | IGHV3-66 | IGHJ5 | IGKV3-15 | IGKJ4 | 3073 | VRMDWME | 4263 | QQYNNWP | Anna Wec et al., 2020 |
| | VISNLAWYQQKPGQAPRLLIFGASTRA | (Human) | (Human) | (Human) | (Human) | | WMKYYFDS | | SLT | (https://science.science |
| | TGVPARFSGSGSGTEFTLTISSLQSEDF | | | | | | | | | mag.org/content/early/ |
| | AVYYCQQYNNWPSLTFGGGTKLEIK | | | | | | | | | 2020/06/15/science.abc |
| | | | | | | | | | | 7424) |
| mAb-97 | DIQVTQSPLSLPVGLGQSASISCRSSQR | IGHV1-69 | IGHJ3 | IGKV2-30 | IGKJ3 | 3074 | ARDPSILNTG | 4264 | MQATEWP | Anna Wec et al., 2020 |
| | VVHTDGNTYLNWFHQRPGQSPRRLIY | (Human) | (Human) | (Human) | (Human) | | NHHWYDLD | | RT | (https://science.science |
| | KVSNRDSGVPDRFSGSGSGTDFTLRIS | | | | | | M | | | mag.org/content/early/ |
| | RVEAEDVGVYYCMQATEWPRTFGQG | | | | | | | | | 2020/06/15/science.abc |
| | TKVDIK | | | | | | | | | 7424) |
| mAb-98 | EIVMTQSPATLSLSPGERATLSCRASQS | IGHV3-30 | IGHJ5 | IGKV3-11 | IGKJ2 | 3075 | VRDDVLQHS | 4265 | QQRSDGY | Anna Wec et al., 2020 |
| | VSTFLGWYQQRPGQPPRLLIYDASYR | (Human) | (Human) | (Human) | (Human) | | RPSGPGYFVS | | N | (https://science.science |
| | APDIPVRFSGSGSGTDFTLTINSLEPED | | | | | | | | | mag.org/content/early/ |
| | SAVYYCQQRSDGYNFGPGTKLEIK | | | | | | | | | 2020/06/15/science.abc |
| | | | | | | | | | | 7424) |
| mAb-99 | QPVLTQPPSVSVSPGQTARITCSGDAL | IGHV4-4 | IGHJ6 | IGLV3-10 | IGLJ3 | 3076 | ATMWGGLCT | 4266 | YSTDSTAN | Anna Wec et al., 2020 |
| | PRRYAYWYQQRSGQAPVLVIYEDNKR | (Human) | (Human) | (Human) | (Human) | | ASNCYGNPM | | YKV | (https://science.science |
| | PSGIPERFSAFSSGTRATLTISGAQVED | | | | | | DV | | | mag.org/content/early/ |
| | QADYYCYSTDSTANYKVFGGGTKLTVL | | | | | | | | | 2020/06/15/science.abc |
| | | | | | | | | | | 7424) |
| mBG17 | DIVMSQSPSSLAVSVGEKITMSCKSSQ | IGHV6-6 | IGHJ4 | IGKV8-30 | IGKJ1 | 3077 | TRSAMDY | 4267 | QQFYNYPR | James Terry et al., 2020 |
| | SLLYTSDQKNYLAWFQQKPGQSPKLLI | (Mouse) | (Mouse) | (Mouse) | (Mouse) | | | | T | (https://www.biorxiv.or |
| | FWASTRDSGVPDRFTGSGSGTDFTLTI | | | | | | | | | g/content/10.1101/202 |
| | SSVKAEDLAVYYCQQFYNYPRTFGGG | | | | | | | | | 0.09.03.280370v1.full) |
| | TKLEIK | | | | | | | | | |
| mBG21 | IVMTQTPKFLLVSAGDRVTITCKASQS | IGHV9-2- | IGHJ3 | IGKV6-32 | IGKJ1 | 3078 | ALRR | 4268 | QQDYSSP | James Terry et al., 2020 |
| | VSNDVAWFQQKPGQSPKKLLIYFASN | 1 | (Mouse) | (Mouse) | (Mouse) | | | | | (https://www.biorxiv.or |
| | RYTGVPDRFTGSGYGTDFTFTITTVQA | (Mouse) | | | | | | | | g/content/10.1101/202 |
| | EDLAVYFCQQDYSSPWTFGGGTKLEIK | | | | | | | | | 0.09.03.280370v1.full) |
| mBG22 | IVMTQTPKFLLVSAGDRVTITCKASQS | IGHV9-2- | IGHJ3 | IGKV6-32 | IGKJ1 | 3079 | ALRR | 4269 | QQDYSSP | James Terry et al., 2020 |
| | VSNDVAWFQQKPGQSPKLLIYFASNR | 1 | (Mouse) | (Mouse) | (Mouse) | | | | | (https://www.biorxiv.or |
| | YTGVPDRFTGSGYGTDFTFTITTVQAE | (Mouse) | | | | | | | | g/content/10.1101/202 |
| | DLAVYFCQQDYSSPWTFGGGTKLEIK | | | | | | | | | 0.09.03.280370v1.full) |
| mBG57 | DIVMTQAAPSEPVTPGESVSISCGSSK | IGHV9-2- | IGHJ3 | IGKV2-137 | IGKJ5 | 3080 | ALRR | 4270 | MQHLENP | James Terry et al., 2020 |
| | SLLHSNDNTYLYWFLQRPGQSPQLLIY | 1 | (Mouse) | (Mouse) | (Mouse) | | | | LGVR | (https://www.biorxiv.or |
| | RMSNLASGVPDRFTGSGSGTAFTLRIS | (Mouse) | | | | | | | | g/content/10.1101/202 |
| | RVEAEDVGVYYCMQHLENPLGVRWR | | | | | | | | | 0.09.03.280370v1.full) |
| | HQAGNQT | | | | | | | | | |

| | | | | | Not | | | | | |
|---|---|---|---|---|---|---|---|---|---|---|
| | Ab | | | Neutral- | Neutral- | | | SEQ | | SEQ |
| | or | | Doesn't | ising | ising | Protein + | | ID | | ID |
| Name | Nb | Binds to | Bind to | Vs | Vs | Epitope | Origin | NO.: | VH or VHH | NO.: |
| mBG67 | Ab | SARS-CoV1, | 229E | | | N | Immunised Mouse | 975 | EVQLVESGGGLVQPGGSLKLSCAASGFT | 2042 |
| | | SARS-CoV2, | | | | | | | FSNYGMSWVRQTPDKRLELVATINRNG | |
| | | NL63 | | | | | | | GSTYYLDSVKVRFTISRDNAKSTLFLQLSS | |
| | | (weak) | | | | | | | LKSDDTAMYYCARIYDFDEDYFDVWGA | |
| | | | | | | | | | GTTVTVSS | |
| MD17 | Ab | SARS-CoV2 | | SARS-CoV2 | | S; RBD | Phage Display | | ND | |
| | | | | (weak) | | | Library (Antibody, | | | |
| | | | | | | | human, immune- | | | |
| | | | | | | | CoV2) | | | |
| MD29 | Ab | SARS-CoV2 | | SARS-CoV2 | | S; RBD | Phage Display | | ND | |
| | | | | (weak) | | | Library (Antibody, | | | |
| | | | | | | | human, immune- | | | |
| | | | | | | | CoV2) | | | |
| MD45 | Ab | SARS-CoV2 | | SARS-CoV2 | | S; RBD | Phage Display | | ND | |
| | | | | | | | Library (Antibody, | | | |
| | | | | | | | human, immune- | | | |
| | | | | | | | CoV2) | | | |
| MD47 | Ab | SARS-CoV2 | | SARS-CoV2 | | S; RBD | Phage Display | | ND | |
| | | | | (weak) | | | Library (Antibody, | | | |
| | | | | | | | human, immune- | | | |
| | | | | | | | CoV2 | | | |
| MD62 | Ab | SARS-CoV2 | | SARS-CoV2 | | S; RBD | Phage Display | | ND | |
| | | | | | | | Library (Antibody, | | | |
| | | | | | | | human, immune- | | | |
| | | | | | | | CoV2) | | | |
| MD63 | Ab | SARS-CoV2 | | | SARS-CoV2 | S; RBD | Phage Display | | ND | |
| | | | | | | | Library (Antibody, | | | |
| | | | | | | | human, immune- | | | |
| | | | | | | | CoV2) | | | |
| MD65 | Ab | SARS-CoV2 | | SARS-CoV2 | | S; RBD | Phage Display | | ND | |
| | | | | | | | Library (Antibody, | | | |
| | | | | | | | human, immune- | | | |
| | | | | | | | CoV2) | | | |
| MD67 | Ab | SARS-CoV2 | | SARS-CoV2 | | S; RBD | Phage Display | | ND | |
| | | | | | | | Library (Antibody, | | | |
| | | | | | | | human, immune- | | | |
| | | | | | | | CoV2) | | | |
| mNb6 | Nb | SARS-CoV2 | | SARS-CoV2 | | S; RBD | Yeast Display | | ND | |
| | | | | | | | Library (scFv, | | | |
| | | | | | | | human) | | | |
| mNb6-tri | Nb | SARS-CoV2 | | SARS-CoV2 | | S; RBD | Yeast Display | | ND | |
| | | | | | | | Library (scFv, | | | |
| | | | | | | | human) | | | |
| MnC1t3p1_ | Ab | SARS-CoV2 | | SARS-CoV2 | | S; RBD | B-cells; SARS-CoV2 | 976 | EVQLLESGGGLVQPGGSLRLSCAASGFT | 2043 |
| G9 | | | | | | | Human Patient | | FRNYAMTWVRQAPGKGLEWVSGISDS | |
| | | | | | | | | | GDRTYNADSVKGRFSISRDNSKNTLHLQ | |
| | | | | | | | | | MNSLRAEDTAVYYCALASGSYFGGANY | |
| | | | | | | | | | WGQGTLVTVSS | |
| MnC2t1p1_ | Ab | SARS-CoV2 | | SARS-CoV2 | | S; RBD | B-cells; SARS-CoV2 | 977 | EVQLVESGGGLVQPGGSLRLSCAASGFT | 2044 |
| A3 | | | | | | | Human Patient | | VSSNYMSWVRQAPGRGLEWVSVIYSG | |
| | | | | | | | | | GSTFYADSVKGRFTISRDNSKNTLYLQM | |
| | | | | | | | | | NSLRPEDTAVYYCATGARFGESPFDYW | |
| | | | | | | | | | GQGTLVTVSS | |
| MnC2t1p1_ | Ab | SARS-CoV2 | | SARS-CoV2 | | S; RBD | B-cells; SARS-CoV2 | 978 | EVQLVESGGGLVQPGGSLRLSCAASGFT | 2045 |
| C5 | | | | | | | Human Patient | | VSSNYMSWVRQAPGKGLEWVSVIYSG | |
| | | | | | | | | | GSTYYADSVKGRFTISRDNSKNTLYLQM | |
| | | | | | | | | | NSLRAEDTAVYYCATGARFGESPFDYW | |
| | | | | | | | | | GQGTLVTVSS | |

| | | | | | | SEQ | | SEQ | | |
|---|---|---|---|---|---|---|---|---|---|---|
| | | Heavy V | Heavy J | Light V | Light J | ID | | ID | | |
| Name | VL | Gene | Gene | Gene | Gene | NO.: | CDRH3 | NO.: | CDRL3 | Sources |
| mBG67 | QIVLTQSPAIMSASLGERVTMTCTASS | IGHV5-6- | IGHJ1 | IGKV4-74 | IGKJ1 | 3081 | ARIYDFDEDY | 4271 | LQYHRSP | James Terry et al., 2020 |
| | SVSSSYLHWYQQKPGSSPKLWIYSTSN | 3 | (Mouse) | (Mouse) | (Mouse) | | FDV | | | (https://www.biorxiv.or |
| | LASGVPARFSGSGSGTSYSLTISSMEAE | (Mouse) | | | | | | | | g/content/10.1101/202 |
| | DAATYYCLQYHRSPWTFGGGTKLEIK | | | | | | | | | 0.09.03.280370v1.full) |
| MD17 | ND | IGHV3-64 | ND | IGKV1-39 | ND | 3082 | VKDQDSSSW | 4272 | QQSYTTPL | Tal Noy-Porat et al., |
| | | (Human) | | (Human) | | | YDAFDI | | T | 2020 |
| | | | | | | | | | | (https://www.biorxiv.or |
| | | | | | | | | | | g/content/10.1101/202 |
| | | | | | | | | | | 0.05.20.106609v2) |
| MD29 | ND | IGHV3-64 | ND | IGKV1-39 | ND | 3083 | VKDQDSSSW | 4273 | HQTYTSPY | Tal Noy-Porat et al., |
| | | (Human) | | (Human) | | | YDAFDI | | T | 2020 |
| | | | | | | | | | | (https://www.biorxiv.or |
| | | | | | | | | | | g/content/10.1101/202 |
| | | | | | | | | | | 0.05.20.106609v2) |
| MD45 | ND | IGHV3-53 | ND | IGKV3-20 | ND | 3084 | ARDLSVRGG | 4274 | QQYGVSPE | Tal Noy-Porat et al., |
| | | (Human) | | (Human) | | | MDV | | II | 2020 |
| | | | | | | | | | | (https://www.biorxiv.or |
| | | | | | | | | | | g/content/10.1101/202 |
| | | | | | | | | | | 0.05.20.106609v2) |
| MD47 | ND | IGHV3-23 | ND | IGLV3-21 | ND | 3085 | AKDLVTAPSY | 4275 | QVWDSSS | Tal Noy-Porat et al., |
| | | (Human) | | (Human) | | | EAFDI | | HHHVV | 2020 |
| | | | | | | | | | | (https://www.biorxiv.or |
| | | | | | | | | | | g/content/10.1101/202 |
| | | | | | | | | | | 0.05.20.106609v2) |
| MD62 | ND | IGHV3-53 | ND | IGKV1-12 | ND | 3086 | ARDLQYYGM | 4276 | QQANSFPL | Tal Noy-Porat et al., |
| | | (Human) | | (Human) | | | DV | | T | 2020 |
| | | | | | | | | | | (https://www.biorxiv.or |
| | | | | | | | | | | g/content/10.1101/202 |
| | | | | | | | | | | 0.05.20.106609v2) |
| MD63 | ND | IGHV3-64 | ND | IGKV1-39 | ND | 3087 | VKDQDSNSW | 4277 | QQSYSTPY | Tal Noy-Porat et al., |
| | | (Human) | | (Human) | | | YDAFDI | | T | 2020 |
| | | | | | | | | | | (https://www.biorxiv.or |
| | | | | | | | | | | g/content/10.1101/202 |
| | | | | | | | | | | 0.05.20.106609v2) |
| MD65 | ND | IGHV3-66 | ND | IGKV3-20 | ND | 3088 | ARDLAVAGAF | 4278 | QQYGSSPL | Tal Noy-Porat et al., |
| | | (Human) | | (Human) | | | DI | | T | 2020 |
| | | | | | | | | | | (https://www.biorxiv.or |
| | | | | | | | | | | g/content/10.1101/202 |
| | | | | | | | | | | 0.05.20.106609v2) |
| MD67 | ND | IGHV3-53 | ND | IGKV3-20 | ND | 3089 | ARDLSVRGG | 4279 | QQFGSSPL | Tal Noy-Porat et al., |
| | | (Human) | | (Human) | | | MDV | | T | 2020 |
| | | | | | | | | | | (https://www.biorxiv.or |
| | | | | | | | | | | g/content/10.1101/202 |
| | | | | | | | | | | 0.05.20.106609v2) |
| mNb6 | ND | ND | ND | ND | ND | | ND | | ND | Michael Schoof et al., |
| | | | | | | | | | | 2020 |
| | | | | | | | | | | (https://www.biorxiv.or |
| | | | | | | | | | | g/content/10.1101/202 |
| | | | | | | | | | | 0.08.08.238469v1.full.p |
| | | | | | | | | | | df) |
| mNb6-tri | ND | ND | ND | ND | ND | | ND | | ND | Michael Schoof et al., |
| | | | | | | | | | | 2020 |
| | | | | | | | | | | (https://www.biorxiv.or |
| | | | | | | | | | | g/content/10.1101/202 |
| | | | | | | | | | | 0.08.08.238469v1.full.p |
| | | | | | | | | | | df) |
| MnC1t3p1_ | QAVVTQEPSLTVSPGGTVTLTCGSSTG | IGHV3-23 | IGHJ4 | IGLV7-46 | IGLJ3 | 3090 | ALASGSYFGG | 4280 | LLSYTGAR | Christoph Kreer et al., |
| G9 | PVTSDHYPYWFQQKPGQAPTTLIYDT | (Human) | (Human) | (Human) | (Human) | | ANY | | V | 2020 |
| | NNKHSWTPARFSGSLLGGKAALTLSG | | | | | | | | | (https://doi.org/10.101 |
| | AQPEDEAEYYCLLSYTGARVFGGGTKL | | | | | | | | | 6/j.cell.2020.06.044) |
| | TVL | | | | | | | | | |
| MnC2t1p1_ | DIQMTQSPSSVSASVGDRVTITCRASQ | IGHV3-66 | IGHJ4 | IGKV1D-12 | IGKJ1 | 3091 | ATGARFGESP | 4281 | QQANSFP | Christoph Kreer et al., |
| A3 | GISSWLAWYQQKPGKAPKLLIYAASSL | (Human) | (Human) | (Human) | (Human) | | FDY | | GT | 2020 |
| | QSGVPSRFSGSGSGTDFTLTISSLQPED | | | | | | | | | (https://doi.org/10.101 |
| | FATYYCQQANSFPGTFGQGTKVEIK | | | | | | | | | 6/j.cell.2020.06.044) |
| MnC2t1p1_ | DIQMTQSPSSVSASVGDRVTITCRASQ | IGHV3-66 | IGHJ4 | IGKV1D-12 | IGKJ1 | 3092 | ATGARFGESP | 4282 | QQANSFP | Christoph Kreer et al., |
| C5 | GISSWLAWYQQKPGKAPKLLIYAASSL | (Human) | (Human) | (Human) | (Human) | | FDY | | GT | 2020 |
| | QSGVPSRFSGSGSGTDFTLTISSLOPED | | | | | | | | | (https://doi.org/10.101 |
| | FATYYCQQANSFPGTFGQGTKVEIK | | | | | | | | | 6/j.cell.2020.06.044) |

| | | | | | Not | | | | | |
|---|---|---|---|---|---|---|---|---|---|---|
| | Ab | | | Neutral- | Neutral- | | | SEQ | | SEQ |
| | or | | Doesn't | ising | ising | Protein + | | ID | | ID |
| Name | Nb | Binds to | Bind to | Vs | Vs | Epitope | Origin | NO.: | VH or VHH | NO.: |
| MnC2t2p1_ | Ab | SARS-CoV2 | | SARS-CoV2 | | S; RBD | B-cells; SARS-CoV2 | 979 | QVQLVQSGAEVKKPGSSVKVSCKASGG | 2046 |
| C11 | | | | | | | Human Patient | | TFSRYTIIWVRQAPGQGLEWMGRIIPIL | |
| | | | | | | | | | DIANYAQKFQGRVTITADKSTSTAYMEL | |
| | | | | | | | | | SSLRSEDTAVYYCAREGGLDYFGSRNSG | |
| | | | | | | | | | WTYTWFDPWGQGTLVTVSS | |
| MnC4t1p1_ | Ab | SARS-CoV2 | | SARS-CoV2 | | S; RBD | B-cells; SARS-CoV2 | 980 | QLQVQESGPGLVKPSETLSLTCTVSGASI | 2047 |
| A10 | | | | | | | Human Patient | | SSNHYFWGWIRQPPGKGLAWIGSMHY | |
| | | | | | | | | | SGSTYYNPSLKSRVTISVDTSKNQLSLKLS | |
| | | | | | | | | | SVTAADTAVYYCARGVNYYDRNGYYRN | |
| | | | | | | | | | DGFDIRGQGTMVTVSS | |
| MnC4t1p1_ | Ab | SARS-CoV2 | | SARS-CoV2 | | S; RBD | B-cells; SARS-CoV2 | 981 | EVQLVESGGGLVQPGGSLRLSCAASGFT | 2048 |
| A11 | | | | | | | Human Patient | | FSSYSMNWVRQAPGKGLEWVSYISSSS | |
| | | | | | | | | | NTRYYTDSVMGRFTISRDNAKNSLFLQ | |
| | | | | | | | | | MNSLRAEDTAVYYCASSKGFCSGGSCSD | |
| | | | | | | | | | YWGQGTLVTVSS | |
| MnC4t2p1_ | Ab | SARS-CoV2 | | SARS-CoV2 | | S; RBD | B-cells; SARS-CoV2 | 982 | EVQLVESGGHLVQPGRSLRLSCAASGFT | 2049 |
| B3 | | | | | | | Human Patient | | FDDYAMHWVRQVPGKGLEWVSGISW | |
| | | | | | | | | | NGGILDYADSVKGRFTISRDNAKNSLYL | |
| | | | | | | | | | HMRSLRTDDTALYYCAKDLRRQDYYAD | |
| | | | | | | | | | WYFDLWGRGTLVTVSS | |
| MnC4t2p1_ | Ab | SARS-CoV2 | | SARS-CoV2 | | S; RBD | B-cells; SARS-CoV2 | 983 | QLQVQESGPGLVKPSETLSLTCTVSGASI | 2050 |
| D10 | | | | | | | Human Patient | | SSNHYFWGWIRQPPGKGLAWIGSMHY | |
| | | | | | | | | | SGSTYYNPSLKSRVTISVDTSKNQLSLKLS | |
| | | | | | | | | | SVTAADTAVYYCARGVNYYDRNGYYRN | |
| | | | | | | | | | DGFDIRGQGTMVTVSS | |
| MnC4t2p1_ | Ab | SARS-CoV2 | | SARS-CoV2 | | S; RBD | B-cells; SARS-CoV2 | 984 | EVQLVESGGHLVQPGRSLRLSCAASGFT | 2051 |
| E6 | | | | | | | Human Patient | | FDDYAMHWVRQVPGKGLEWVSGISW | |
| | | | | | | | | | NGGILGYADSVKGRFTISRDNAKNSLYL | |
| | | | | | | | | | QMRSLRTDDTALYYCAKDLRRQDYYAD | |
| | | | | | | | | | WYFDLWGRGTLVTVSS | |
| MnC4t2p1_ | Ab | SARS-CoV2 | | SARS-CoV2 | | S; RBD | B-cells; SARS-CoV2 | 985 | QLQVQESGPGLVKPSETLSLTCTVSGASI | 2052 |
| F5 | | | | | | | Human Patient | | SSNHYFWGWIRQPPGKGLAWIGSMHY | |
| | | | | | | | | | SGSTYYNPSLKSRVTISVDTSKNQLSLKLS | |
| | | | | | | | | | SVTAADTAVYYCARGVNYYDRNGYYRN | |
| | | | | | | | | | DGFDIRGQGTMVTVSS | |
| MnC4t2p2_ | Ab | SARS-CoV2 | | SARS-CoV2 | | S; RBD | B-cells; SARS-CoV2 | 986 | QVQLVQSGSELKKPGASVKISCKASGYIF | 2053 |
| A4 | | | | | | | Human Patient | | INYAMNWVRQAPGQGLEWMGWINT | |
| | | | | | | | | | NTGNPTYAQDFTGRFVFSLDTSLSTAYL | |
| | | | | | | | | | QISSLEAEDTAVYYCAKIGSRNSLGVWG | |
| | | | | | | | | | QGTLVTVSA | |
| MnC5t2p1_ | Ab | SARS-CoV2 | | SARS-CoV2 | | S; RBD | B-cells; SARS-CoV2 | 987 | QMQLVQSGPEVKKPGTSVKVSCKASGF | 2054 |
| G1 | | | | | | | Human Patient | | TFTSSAVQWVRQARGQRLEWIGWIVV | |
| | | | | | | | | | GSGNTDYAQKFQERVTITRDVSTSTAYM | |
| | | | | | | | | | ELSSLRSEDTAVYYCAAPRCSGGSCYDGF | |
| | | | | | | | | | DIWGQGTMVTVSS | |
| MR10 | Nb | SARS-CoV2 | | | | S; RBD | Phage Display | 988 | QVQLVESGGGLVQAGGSLRLSCAASGF | |
| | | | | | | | Library (Nanobody, | | PVANTWMEWYRQAPGKEREWVAAITS | |
| | | | | | | | non-immune) | | YGYRTYYADSVKGRFTISRDNAKNTVYL | |
| | | | | | | | | | QMNSLKPEDTAVYYCNVKDEGATTKVY | |
| | | | | | | | | | DYWGQGTQVTVSS | |
| MR14 | Nb | SARS-CoV2 | | | | S; RBD | Phage Display | 989 | QVQLVESGGGLVQAGGSLRLSCAASGF | |
| | | | | | | | Library (Nanobody, | | PVMYTHMHWYRQAPGKEREWVAAIV | |
| | | | | | | | non-immune) | | SLGEYTTYADSVKGRFTISRDNAKNTVYL | |
| | | | | | | | | | QMNSLKPEDTAVYYCNVKDWGAANKY | |
| | | | | | | | | | YDYWGQGTQVTVSS | |
| MR17 | Nb | SARS-CoV2 | | | | S; RBD | Phage Display | 990 | QVQLVESGGGLVQAGGSLRLSCAASGF | |
| | | | | | | | Library (Nanobody, | | PVEVWRMEWYRQAPGKEREGVAAIES | |
| | | | | | | | non-immune) | | YGHGTRYADSVKGRFTISRDNAKNTVYL | |
| | | | | | | | | | QMNSLKPEDTAVYYCNVKDDGQLAYHY | |
| | | | | | | | | | DYWGQGTQVTVSS | |
| MR17_ | Nb | SARS-CoV2 | | | | S; RBD | Derived from MR17 | 991 | QVQLVESGGGLVQAGGSLRLSCAASGF | |
| K56W | | | | | | | | | PVEVWRMEWYRQAPGKEREGVAAIES | |
| | | | | | | | | | YGWGTRYADSVKGRFTISRDNAKNTVYL | |
| | | | | | | | | | QMNSLKPEDTAVYYCNVKDDGQLAYHY | |
| | | | | | | | | | DYWGQGTQVTVSS | |
| MR17_ | Nb | SARS-CoV2 | | | | S; RBD | Derived from MR17 | 992 | QVQLVESGGGLVQAGGSLRLSCAASGF | |
| K99W | | | | | | | | | PVEVWRMEWYRQAPGKEREGVAAIES | |
| | | | | | | | | | YGHGTRYADSVKGRFTISRDNAKNTVYL | |
| | | | | | | | | | QMNSLKPEDTAVYYCNVWDDGQLAYH | |
| | | | | | | | | | YDYWGQGTQVTVSS | |

| | | | | | | SEQ | | SEQ | | |
|---|---|---|---|---|---|---|---|---|---|---|
| | | Heavy V | Heavy J | Light V | Light J | ID | | ID | | |
| Name | VL | Gene | Gene | Gene | Gene | NO.: | CDRH3 | NO.: | CDRL3 | Sources |
| MnC2t2p1_ | DIQMTQSPSSLSASVGDRVTITCRASQ | IGHV1-69 | IGHJ5 | IGKV1-39 | IGKJ2 | 3093 | AREGGLDYFG | 4283 | QQSYSTLY | Christoph Kreer et al., |
| C11 | NISSYLNWYQQKPGKAPNLLIYAASSL | (Human) | (Human) | (Human) | (Human) | | SRNSGWTYT | | S | 2020 |
| | QSGVPPRFSGSGSGTDFTLTISSLQPED | | | | | | WFDP | | | (https://doi.org/10.101 |
| | FATYYCQQSYSTLYSFGQGTKLEIK | | | | | | | | | 6/j.cell.2020.06.044) |
| MnC4t1p1_ | DIQMTQSPSSLSASVGDRVTITCRASQ | IGHV4-39 | IGHJ3 | IGKV1-17 | IGKJ3 | 3094 | ARGVNYYDR | 4284 | LQHNTYPF | Christoph Kreer et al., |
| A10 | GIRNDLGWYEQKPGKAPKRLIYAASSL | (Human) | (Human) | (Human) | (Human) | | NGYYRNDGF | | T | 2020 |
| | ESGVPSRFSGSGSGTEFTLTISSLQPED | | | | | | DI | | | (https://doi.org/10.101 |
| | FATYYCLQHNTYPFTFGPGTRVDIK | | | | | | | | | 6/j.cell.2020.06.044) |
| MnC4t1p1_ | EIVLTQSPGTLSLSPGERATLSCRASQS | IGHV3-48 | IGHJ4 | IGKV3-20 | IGKJ1 | 3095 | ASSKGFCSGG | 4285 | HQYGSSP | Christoph Kreer et al., |
| A11 | VSSSYLAWYQQKPGQAPRLLIYGVSSR | (Human) | (Human) | (Human) | (Human) | | SCSDY | | WT | 2020 |
| | ATGIPDRFSGSGSGTDFTLTISRLEPED | | | | | | | | | (https://doi.org/10.101 |
| | FVVYYCHQYGSSPWTFGQGTKVEIK | | | | | | | | | 6/j.cell.2020.06.044) |
| MnC4t2p1_ | DIQMIQSPSSVSASVGDRVTITCRASQ | IGHV3-9 | IGHJ2 | IGKV1-12 | IGKJ3 | 3096 | AKDLRRQDYY | 4286 | QQGNSFPF | Christoph Kreer et al., |
| B3 | GISSWLAWYQQKPGKAPKLLIYAASTL | (Human) | (Human) | (Human) | (Human) | | ADWYFDL | | T | 2020 |
| | LSAVPSRFSGSGSGTDFTLTISSLQPED | | | | | | | | | (https://doi.org/10.101 |
| | FATYYCQQGNSFPFTFGPGTIVDV | | | | | | | | | 6/j.cell.2020.06.044) |
| MnC4t2p1_ | DIQMTQSPSSLSASVGDRVTITCRASQ | IGHV4-39 | IGHJ3 | IGKV1-17 | IGKJ3 | 3097 | ARGVNYYDR | 4287 | LQHNTYPF | Christoph Kreer et al., |
| D10 | GIRNDLGWYEQKPGKAPKRLIYAASSL | (Human) | (Human) | (Human) | (Human) | | NGYYRNDGF | | T | 2020 |
| | ESGVPSRFSGSGSGTEFTLTISSLQPED | | | | | | DI | | | (https://doi.org/10.101 |
| | FATYYCLQHNTYPFTFGPGTRVDIK | | | | | | | | | 6/j.cell.2020.06.044) |
| MnC4t2p1_ | DIQMTQSPSSVSASVGDRVTITCRASQ | IGHV3-9 | IGHJ2 | IGKV1-12 | IGKJ3 | 3098 | AKDLRRQDYY | 4288 | QQGNSFPF | Christoph Kreer et al., |
| E6 | GISSWLAWYQQKPGKAPKLLIYAASTL | (Human) | (Human) | (Human) | (Human) | | ADWYFDL | | T | 2020 |
| | LSAVPSRFSGSGSGTDFTLTISSLQPED | | | | | | | | | (https://doi.org/10.101 |
| | FATYYCQQGNSFPFTFGPGTKVDV | | | | | | | | | 6/j.cell.2020.06.044) |
| MnC4t2p1_ | DIQMTQSPSSLSASVGDRVTITCRASQ | IGHV4-39 | IGHJ3 | IGKV1-17 | IGKJ3 | 3099 | ARGVNYYDR | 4289 | LQHNTYPF | Christoph Kreer et al., |
| F5 | GIRNDLGWYEQKPGKAPKRLIYAASSL | (Human) | (Human) | (Human) | (Human) | | NGYYRNDGF | | T | 2020 |
| | ESGVPSRFSGSGSGTEFTLTISSLQPED | | | | | | DI | | | (https://doi.org/10.101 |
| | FATYYCLQHNTYPFTFGPGTRVDIK | | | | | | | | | 6/j.cell.2020.06.044) |
| MnC4t2p2_ | EIVLTQSPGTLSLSPGERATLSCRASHS | IGHV7-4- | IGHJ4 | IGKV3-20 | IGKJ5 | 3100 | AKIGSRNSLG | 4290 | QHFGTSSV | Christoph Kreer et al., |
| A4 | VDRSYLAWYQQKPGLAPRLLIYGASSR | 1 | (Human) | (Human) | (Human) | | V | | T | 2020 |
| | ATGIPDRFSGSGSGTDFTLTISRLEPED | (Human) | | | | | | | | (https://doi.org/10.101 |
| | FALYYCQHFGTSSVTFGRGTRLEIK | | | | | | | | | 6/j.cell.2020.06.044) |
| MnC5t2p1_ | EIVLTQSPGTLSLSPGERATLSCRASQS | IGHV1-58 | IGHJ3 | IGKV3-20 | IGKJ1 | 3101 | AAPRCSGGSC | 4291 | QQYGSSP | Christoph Kreer et al., |
| G1 | VSSSYLAWYQHKPGQAPRLLICGASSR | (Human) | (Human) | (Human) | (Human) | | YDGFDI | | WT | 2020 |
| | ATGIPDRFSGSGSGTGFTLTISRLEPED | | | | | | | | | (https://doi.org/10.101 |
| | FAVYYCQQYGSSPWTFGQGTKVEIK | | | | | | | | | 6/j.cell.2020.06.044) |
| MR10 | N/A | IGHV3S5 | IGHJ4 | N/A | N/A | 3102 | NVKDEGATTK | | N/A | Tingting Li et al., 2020 |
| | | 3 | (Alpaca) | | | | VYDY | | | (https://www.biorxiv.or |
| | | (Alpaca) | | | | | | | | g/content/10.1101/202 |
| | | | | | | | | | | 0.06.09.143438v1) |
| MR14 | N/A | IGHV3S5 | IGHJ4 | N/A | N/A | 3103 | NVKDWGAA | | N/A | Tingting Li et al., 2020 |
| | | 3 | (Alpaca) | | | | NKYYDY | | | (https://www.biorxiv.or |
| | | (Alpaca) | | | | | | | | g/content/10.1101/202 |
| | | | | | | | | | | 0.06.09.143438v1) |
| MR17 | N/A | IGHV3S5 | IGHJ4 | N/A | N/A | 3104 | NVKDDGQLA | | N/A | Tingting Li et al., 2020 |
| | | 3 | (Alpaca) | | | | YHYDY | | | (https://www.biorxiv.or |
| | | (Alpaca) | | | | | | | | g/content/10.1101/202 |
| | | | | | | | | | | 0.06.09.143438v1) |
| MR17_ | N/A | IGHV3S5 | IGHJ4 | N/A | N/A | 3105 | NVKDDGQLA | | N/A | Tingting Li et al., 2020 |
| K56W | | 3 | (Alpaca) | | | | YHYDY | | | (https://www.biorxiv.or |
| | | (Alpaca) | | | | | | | | g/content/10.1101/202 |
| | | | | | | | | | | 0.06.09.143438v1) |
| MR17_ | N/A | IGHV3S5 | IGHJ4 | N/A | N/A | 3106 | NVWDDGQL | | N/A | Tingting Li et al., 2020 |
| K99W | | 3 | (Alpaca) | | | | AYHYDY | | | (https://www.biorxiv.or |
| | | (Alpaca) | | | | | | | | g/content/10.1101/202 |
| | | | | | | | | | | 0.06.09.143438v1) |

| | | | | | Not | | | | | |
|---|---|---|---|---|---|---|---|---|---|---|
| | Ab | | | Neutral- | Neutral- | | | SEQ | | SEQ |
| | or | | Doesn't | ising | ising | Protein + | | ID | | ID |
| Name | Nb | Binds to | Bind to | Vs | Vs | Epitope | Origin | NO.: | VH or VHH | NO.: |
| MR17_ | Nb | SARS-CoV2 | | | | S; RBD | Derived from MR17 | 993 | QVQLVESGGGLVQAGGSLRLSCAASGF | |
| K99Y | | | | | | | | | PVEVWRMEWYRQAPGKEREGVAAIES | |
| | | | | | | | | | YGHGTRYADSVKGRFTISRDNAKNTVYL | |
| | | | | | | | | | QMNSLKPEDTAVYYCNVYDDGQLAYHY | |
| | | | | | | | | | DYWGQGTQVTVSS | |
| MR2 | Nb | SARS-CoV2 | | | | S; RBD | Phage Display | 994 | QVQLVESGGGLVQAGGSLRLSCAASGF | |
| | | | | | | | Library (Nanobody, | | PVYFSYMAWYRQAPGKEREWVAAINSE | |
| | | | | | | | non-immune) | | GDSTTYADSVKGRFTISRDNAKNTVYLQ | |
| | | | | | | | | | MNSLKPEDTAVYYCNVKDYGWYNSQY | |
| | | | | | | | | | DYWGQGTQVTVSS | |
| MR3 | Nb | SARS-CoV2 | | | | S; RBD | Phage Display | 995 | QVQLVESGGGLVQAGGSLRLSCAASGF | |
| | | | | | | | Library (Nanobody, | | PVNAHFMYWYRQAPGKEREWVAAIYS | |
| | | | | | | | non-immune) | | YGRTLYADSVKGRFTISRDNAKNTVYLQ | |
| | | | | | | | | | MNSLKPEDTAVYYCNVKDYGAASWEYD | |
| | | | | | | | | | YWGQGTQVTVSS | |
| MR4 | Nb | SARS-CoV2 | | | | S; RBD | Phage Display | 996 | QVQLVESGGGLVQAGGSLRLSCAASGF | |
| | | | | | | | Library (Nanobody, | | PMYAWEMAWYRQAPGKEREWVAAIR | |
| | | | | | | | non-immune) | | SMGVHTHYSDSVKGRFTISRDNAKNTV | |
| | | | | | | | | | YLQMNSLKPEDTAVYYCNVKDFGGHQA | |
| | | | | | | | | | YYDYWGQGTQVTVSS | |
| MR6 | Nb | SARS-CoV2 | | | | S; RBD | Phage Display | 997 | QVQLVESGGGLVQAGGSLRLSCAASGF | |
| | | | | | | | Library (Nanobody, | | PVEDTWMEWYRQAPGKEREWVAAITS | |
| | | | | | | | non-immune) | | WGFKTYYADSVKGRFTISRDNAKNTVYL | |
| | | | | | | | | | QMNSLKPEDTAVYYCNVKDEGDTSASY | |
| | | | | | | | | | DYWGQGTQVTVSS | |
| MR7 | Nb | SARS-CoV2 | | | | S; RBD | Phage Display | 998 | QVQLVESGGGLVQAGGSLRLSCAASGF | |
| | | | | | | | Library (Nanobody, | | PVNSWMEWYRQAPGKEREWVAAITSY | |
| | | | | | | | non-immune) | | GYKTYYADSVKGRFTISRDNAKNTVYLQ | |
| | | | | | | | | | MNSLKPEDTAVYYCNVKDEGYFSDEYDY | |
| | | | | | | | | | WGQGTQVTVSS | |
| MR8 | Nb | SARS-CoV2 | | | | S; RBD | Phage Display | 999 | QVQLVESGGGLVQAGGSLRLSCAASGF | |
| | | | | | | | Library (Nanobody, | | PVEWAHMHWYRQAPGKEREWVAAIV | |
| | | | | | | | non-immune) | | SAGHYTVYADSVKGRFTISRDNAKNTVY | |
| | | | | | | | | | LQMNSLKPEDTAVYYCNVKDWGSSNQ | |
| | | | | | | | | | YYDYWGQGTQVTVSS | |
| Nb11 | Nb | SARS-CoV2 | | SARS-CoV2 | | S; RBD | Yeast Display | | ND | |
| | | | | | | | Library (scFv, | | | |
| | | | | | | | human) | | | |
| Nb11-59 | Nb | SARS-CoV1, | | SARS-CoV1, | | S; RBD | Phage Display | | ND | |
| | | SARS-CoV2 | | SARS-CoV2 | | | (Immunised Camel) | | | |
| Nb3 | Nb | SARS-CoV2 | | SARS-CoV2 | | S; RBD | Yeast Display | | ND | |
| | | | | | | | Library (scFv, | | | |
| | | | | | | | human) | | | |
| Nb3-bi | Nb | SARS-CoV2 | | SARS-CoV2 | | S; RBD | Yeast Display | | ND | |
| | | | | | | | Library (scFv, | | | |
| | | | | | | | human) | | | |
| Nb3-tri | Nb | SARS-CoV2 | | SARS-CoV2 | | S; RBD | Yeast Display | | ND | |
| | | | | | | | Library (scFv, | | | |
| | | | | | | | human) | | | |
| Nb4-43 | Nb | SARS-CoV2 | SARS- | SARS-CoV2 | SARS-CoV1 | S; RBD | Phage Display | | ND | |
| | | | CoV1 | | | | (Immunised Camel) | | | |

| | | | | | | SEQ | | SEQ | | |
|---|---|---|---|---|---|---|---|---|---|---|
| | | Heavy V | Heavy J | Light V | Light J | ID | | ID | | |
| Name | VL | Gene | Gene | Gene | Gene | NO.: | CDRH3 | NO.: | CDRL3 | Sources |
| MR17_ | N/A | IGHV3S5 | IGHJ4 | N/A | N/A | 3107 | NVYDDGQLA | | N/A | Tingting Li et al., 2020 |
| K99Y | | 3 | (Alpaca) | | | | YHYDY | | | (https://www.biorxiv.or |
| | | (Alpaca) | | | | | | | | g/content/10.1101/202 |
| | | | | | | | | | | 0.06.09.143438v1) |
| MR2 | N/A | IGHV3S5 | IGHJ4 | N/A | N/A | 3108 | NVKDYGWYN | | N/A | Tingting Li et al., 2020 |
| | | 3 | (Alpaca) | | | | SQYDY | | | (https://www.biorxiv.or |
| | | (Alpaca) | | | | | | | | g/content/10.1101/202 |
| | | | | | | | | | | 0.06.09.143438v1) |
| MR3 | N/A | IGHV3S5 | IGHJ4 | N/A | N/A | 3109 | NVKDYGAAS | | N/A | Tingting Li et al., 2020 |
| | | 3 | (Alpaca) | | | | WEYDY | | | (https://www.biorxiv.or |
| | | (Alpaca) | | | | | | | | g/content/10.1101/202 |
| | | | | | | | | | | 0.06.09.143438v1) |
| MR4 | N/A | IGHV3S5 | IGHJ4 | N/A | N/A | 3110 | NVKDFGGHQ | | N/A | Tingting Li et al., 2020 |
| | | 3 | (Alpaca) | | | | AYYDY | | | (https://www.biorxiv.or |
| | | (Alpaca) | | | | | | | | g/content/10.1101/202 |
| | | | | | | | | | | 0.06.09.143438v1) |
| MR6 | N/A | IGHV3S5 | IGHJ4 | N/A | N/A | 3111 | NVKDEGDTS | | N/A | Tingting Li et al., 2020 |
| | | 3 | (Alpaca) | | | | ASYDY | | | (https://www.biorxiv.or |
| | | (Alpaca) | | | | | | | | g/content/10.1101/202 |
| | | | | | | | | | | 0.06.09.143438v1) |
| MR7 | N/A | IGHV3S5 | IGHJ4 | N/A | N/A | 3112 | NVKDEGYFSD | | N/A | Tingting Li et al., 2020 |
| | | 3 | (Alpaca) | | | | EYDY | | | (https://www.biorxiv.or |
| | | (Alpaca) | | | | | | | | g/content/10.1101/202 |
| | | | | | | | | | | 0.06.09.143438v1) |
| MR8 | N/A | IGHV3S5 | IGHJ4 | N/A | N/A | 3113 | NVKDWGSSN | | N/A | Tingting Li et al., 2020 |
| | | 3 | (Alpaca) | | | | QYYDY | | | (https://www.biorxiv.or |
| | | (Alpaca) | | | | | | | | g/content/10.1101/202 |
| | | | | | | | | | | 0.06.09.143438v1) |
| Nb11 | ND | ND | ND | ND | ND | | ND | | ND | Michael Schoof et al., |
| | | | | | | | | | | 2020 |
| | | | | | | | | | | (https://www.biorxiv.or |
| | | | | | | | | | | g/content/10.1101/202 |
| | | | | | | | | | | 0.08.08.238469v1.full.p |
| | | | | | | | | | | df) |
| Nb11-59 | ND | ND | ND | ND | ND | | ND | | ND | Junwei Gai et al., 2020 |
| | | | | | | | | | | (https://www.biorxiv.or |
| | | | | | | | | | | g/content/10.1101/202 |
| | | | | | | | | | | 0.08.09.242867v1.full.p |
| | | | | | | | | | | df) |
| Nb3 | ND | ND | ND | ND | ND | | ND | | ND | Michael Schoof et al., |
| | | | | | | | | | | 2020 |
| | | | | | | | | | | (https://www.biorxiv.or |
| | | | | | | | | | | g/content/10.1101/202 |
| | | | | | | | | | | 0.08.08.238469v1.full.p |
| | | | | | | | | | | df) |
| Nb3-bi | ND | ND | ND | ND | ND | | ND | | ND | Michael Schoof et al., |
| | | | | | | | | | | 2020 |
| | | | | | | | | | | (https://www.biorxiv.or |
| | | | | | | | | | | g/content/10.1101/202 |
| | | | | | | | | | | 0.08.08.238469v1.full.p |
| | | | | | | | | | | df) |
| Nb3-tri | ND | ND | ND | ND | ND | | ND | | ND | Michael Schoof et al., |
| | | | | | | | | | | 2020 |
| | | | | | | | | | | (https://www.biorxiv.or |
| | | | | | | | | | | g/content/10.1101/202 |
| | | | | | | | | | | 0.08.08.238469v1.full.p |
| | | | | | | | | | | df) |
| Nb4-43 | ND | ND | ND | ND | ND | | ND | | ND | Junwei Gai et al., 2020 |
| | | | | | | | | | | (https://www.biorxiv.or |
| | | | | | | | | | | g/content/10.1101/202 |
| | | | | | | | | | | 0.08.09.242867v1.full.p |
| | | | | | | | | | | df) |

| | | | | | Not | | | | | |
|---|---|---|---|---|---|---|---|---|---|---|
| | Ab | | | Neutral- | Neutral- | | | SEQ | | SEQ |
| | or | | Doesn't | ising | ising | Protein + | | ID | | ID |
| Name | Nb | Binds to | Bind to | Vs | Vs | Epitope | Origin | NO.: | VH or VHH | NO.: |
| Nb6 | Nb | SARS-CoV2 | | SARS-CoV2 | | S; RBD | Yeast Display | | ND | |
| | | | | | | | Library (scFv, | | | |
| | | | | | | | human) | | | |
| Nb6-tri | Nb | SARS-CoV2 | | SARS-CoV2 | | S; RBD | Yeast Display | | ND | |
| | | | | | | | Library (scFv, | | | |
| | | | | | | | human) | | | |
| NIH- | Nb | SARS-CoV2 | | | | S; RBD | Immunised Llama | 1000 | DVQLQESGGDLVQPGGSLRLSCAASGF | |
| CoVnb- | | | | | | | | | TLDYYAIGWFRQAPGKEREGVSCISSSD | |
| 101 | | | | | | | | | GSTYYADSVKGRFTSSRDNAKNTVYLQ | |
| | | | | | | | | | MNSLKPEDTAVYYCAAVPSTYYNGSYYY | |
| | | | | | | | | | TCHPGGMDYWGKGTQVTVSS | |
| NIH- | Nb | SARS-CoV2 | | | | S; RBD | Immunised Llama | 1001 | DVQLQESGGGLVQPGGSLRLSCAVSGF | |
| CoVnb- | | | | | | | | | TLDYYAIGWFRQAPGKEREGVSCISSSD | |
| 102 | | | | | | | | | GSTYYADSVKGRFTSSRDNAKNTVYLQ | |
| | | | | | | | | | MNSLKPEDTAVYYCAAVPSTYYSGTYYY | |
| | | | | | | | | | NCHPGGMDYWGKGTQVTVSS | |
| NIH- | Nb | SARS-CoV2 | | | | S; RBD | Immunised Llama | 1002 | DVQLQESGGGLVQPGGSLRLSCAASGL | |
| CoVnb- | | | | | | | | | TLDYYTIGWFRQAPGKEREGVSCISSSD | |
| 103 | | | | | | | | | DSTYYADSVKGRFTISRDNAKNTVYLQM | |
| | | | | | | | | | NSLKPEDTAVYYCATAPGTYYKGSYYPM | |
| | | | | | | | | | CHYYGMDYWGKGTQVTVSS | |
| NIH- | Nb | SARS-CoV2 | | | | S; RBD | Immunised Llama | 1003 | DVQLQESGGGLVQPGGSLRLSCAVSGF | |
| CoVnb- | | | | | | | | | TLDYYAIGWFRQAPGKEREGVACISSSD | |
| 104 | | | | | | | | | GTTYYADSVKGRFTISRDNAKNTVYLQM | |
| | | | | | | | | | NSLKPEDTAVYYCATRPLTYYSGSYYTTCS | |
| | | | | | | | | | DYGMDYWGKGTLVTVSS | |
| NIH | Nb | SARS-CoV2 | | | | S; RBD | Immunised Llama | 1004 | DVQLQESGGGLVQPGGSLRLSCAASGF | |
| CoVnb- | | | | | | | | | TLDYYAIGWFRQAPGKEREGVSCISNSD | |
| 105 | | | | | | | | | GSTYYADSVKGRFTTSRDNAKNTVYLQ | |
| | | | | | | | | | MNSLKPEDTAVYYCAAVPSTYYSGSYYYT | |
| | | | | | | | | | CHPGGMDYWGKGTQVTVSS | |
| NIH- | Nb | SARS-CoV2 | | | | S; RBD | Immunised Llama | 1005 | DVQLQESGGGLVQSGGSLRLSCAASGF | |
| CoVnb- | | | | | | | | | TLDYYAIGWFRQAPGKEREGVSCISNSD | |
| 106 | | | | | | | | | GSTYYADSVKGRFTTSRDNAKNTVYLQ | |
| | | | | | | | | | MNSLKPEDTAVYYCAAVPSTYYSGSYYYT | |
| | | | | | | | | | CHPGGMDYWGKGTQVTVSS | |
| NIH- | Nb | SARS-CoV2 | | | | S; RBD | Immunised Llama | 1006 | DVQLQESGGGLVQPGGSLRLSCAASGF | |
| CoVnb- | | | | | | | | | TLDYYAIGWFRQAPGKEREGVSCISNSD | |
| 107 | | | | | | | | | GSTYYADSVKGRFTTSRDNAKNTVYLQ | |
| | | | | | | | | | MNSLKPEDTAVYYCAAVPSTYYSGSYYYT | |
| | | | | | | | | | CHPGGMDYWGKGTLVTVSS | |
| NIH- | Nb | SARS-CoV2 | | | | S; RBD | Immunised Llama | 1007 | DVQLQESGGGLVQPGGSLRLSCAASGF | |
| CoVnb- | | | | | | | | | TLDYYAIGWFRQAPGKEREGVSCISNSG | |
| 108 | | | | | | | | | GSTYYADSVKGRFTTSRDNAKNTVYLQ | |
| | | | | | | | | | MNSLKPEDTAVYYCAAVPSTYYSGSYYYT | |
| | | | | | | | | | CHPGGMDYWGKGTQVTVSS | |
| NIH- | Nb | SARS-CoV2 | | | | S; RBD | Immunised Llama | 1008 | DVQLQESGGGLVQSGGSLRLSCAASGF | |
| CoVnb- | | | | | | | | | TLDYYAIGWFRQAPGKEREGVSCITNSD | |
| 109 | | | | | | | | | GSTYYADSVKGRFTTSRDNAKNTVYLQ | |
| | | | | | | | | | MNSLKPEDTAVYYCASFPSTYYSGSYYYT | |
| | | | | | | | | | CHPGGMDYWGKGTQVTVSS | |
| NIH- | Nb | SARS-CoV2 | | | | S; RBD | Immunised Llama | 1009 | DVQLQESGGGLVQPGGSLRLSCAASGF | |
| CoVnb- | | | | | | | | | TLDYYAIGWFRQAPGKEREGVSCISSSD | |
| 110 | | | | | | | | | GSTYYADSVKGRFTISRDNAKNTVYLQM | |
| | | | | | | | | | NSLKPDDTAVYYCAAALSEGGYTIDGSS | |
| | | | | | | | | | WCYHSVYGMDYWGKGTQVTVSS | |

| | | | | | | SEQ | | SEQ | | |
|---|---|---|---|---|---|---|---|---|---|---|
| | | Heavy V | Heavy J | Light V | Light J | ID | | ID | | |
| Name | VL | Gene | Gene | Gene | Gene | NO.: | CDRH3 | NO.: | CDRL3 | Sources |
| Nb6 | ND | ND | ND | ND | ND | | ND | | ND | Michael Schoof et al., |
| | | | | | | | | | | 2020 |
| | | | | | | | | | | (https://www.biorxiv.or |
| | | | | | | | | | | g/content/10.1101/202 |
| | | | | | | | | | | 0.08.08.238469v1.full.p |
| | | | | | | | | | | df) |
| Nb6-tri | ND | ND | ND | ND | ND | | ND | | ND | Michael Schoof et al., |
| | | | | | | | | | | 2020 |
| | | | | | | | | | | (https://www.biorxiv.or |
| | | | | | | | | | | g/content/10.1101/202 |
| | | | | | | | | | | 0.08.08.238469v1.full.p |
| | | | | | | | | | | df) |
| NIH- | N/A | IGHV3-3 | IGHJ7 | N/A | N/A | 3114 | AAVPSTYYNG | | N/A | Thomas Esparza et al., |
| CoVnb- | | (Alpaca) | (Alpaca) | | | | SYYYTCHPGG | | | 2020 |
| 101 | | | | | | | MDY | | | (https://www.biorxiv.or |
| | | | | | | | | | | g/content/10.1101/202 |
| | | | | | | | | | | 0.07.24.219857v1) |
| NIH- | N/A | IGHV3-3 | IGHJ7 | N/A | N/A | 3115 | AAVPSTYYSG | | N/A | Thomas Esparza et al., |
| CoVnb- | | (Alpaca) | (Alpaca) | | | | TYYYNCHPGG | | | 2020 |
| 102 | | | | | | | MDY | | | (https://www.biorxiv.or |
| | | | | | | | | | | g/content/10.1101/202 |
| | | | | | | | | | | 0.07.24.219857v1) |
| NIH- | N/A | IGHV3-3 | IGHJ7 | N/A | N/A | 3116 | ATAPGTYYKG | | N/A | Thomas Esparza et al., |
| CoVnb- | | (Alpaca) | (Alpaca) | | | | SYYPMCHYYG | | | 2020 |
| 103 | | | | | | | MDY | | | (https://www.biorxiv.or |
| | | | | | | | | | | g/content/10.1101/202 |
| | | | | | | | | | | 0.07.24.219857v1) |
| NIH- | N/A | IGHV3-3 | IGHJ7 | N/A | N/A | 3117 | ATRPLTYYSGS | | N/A | Thomas Esparza et al., |
| CoVnb- | | (Alpaca) | (Alpaca) | | | | YYTTCSDYGM | | | 2020 |
| 104 | | | | | | | DY | | | (https://www.biorxiv.or |
| | | | | | | | | | | g/content/10.1101/202 |
| | | | | | | | | | | 0.07.24.219857v1) |
| NIH | N/A | IGHV3-3 | IGHJ7 | N/A | N/A | 3118 | AAVPSTYYSG | | N/A | Thomas Esparza et al., |
| CoVnb- | | (Alpaca) | (Alpaca) | | | | SYYYTCHPGG | | | 2020 |
| 105 | | | | | | | MDY | | | (https://www.biorxiv.or |
| | | | | | | | | | | g/content/10.1101/202 |
| | | | | | | | | | | 0.07.24.219857v1) |
| NIH- | N/A | IGHV3-3 | IGHJ7 | N/A | N/A | 3119 | AAVPSTYYSG | | N/A | Thomas Esparza et al., |
| CoVnb- | | (Alpaca) | (Alpaca) | | | | SYYYTCHPGG | | | 2020 |
| 106 | | | | | | | MDY | | | (https://www.biorxiv.or |
| | | | | | | | | | | g/content/10.1101/202 |
| | | | | | | | | | | 0.07.24.219857v1) |
| NIH- | N/A | IGHV3-3 | IGHJ7 | N/A | N/A | 3120 | AAVPSTYYSG | | N/A | Thomas Esparza et al., |
| CoVnb- | | (Alpaca) | (Alpaca) | | | | SYYYTCHPGG | | | 2020 |
| 107 | | | | | | | IMDY | | | (https://www.biorxiv.or |
| | | | | | | | | | | g/content/10.1101/202 |
| | | | | | | | | | | 0.07.24.219857v1) |
| NIH- | N/A | IGHV3-3 | IGHJ7 | N/A | N/A | 3121 | AAVPSTYYSG | | N/A | Thomas Esparza et al., |
| CoVnb- | | (Alpaca) | (Alpaca) | | | | SYYYTCHPGG | | | 2020 |
| 108 | | | | | | | MDY | | | (https://www.biorxiv.or |
| | | | | | | | | | | g/content/10.1101/202 |
| | | | | | | | | | | 0.07.24.219857v1) |
| NIH- | N/A | IGHV3-3 | IGHJ7 | N/A | N/A | 3122 | ASFPSTYYSGS | | N/A | Thomas Esparza et al., |
| CoVnb- | | (Alpaca) | (Alpaca) | | | | YYYTCHPGG | | | 2020 |
| 109 | | | | | | | MDY | | | (https://www.biorxiv.or |
| | | | | | | | | | | g/content/10.1101/202 |
| | | | | | | | | | | 0.07.24.219857v1) |
| NIH- | N/A | IGHV3-3 | IGHJ7 | N/A | N/A | 3123 | AAVPSTYYSG | | N/A | Thomas Esparza et al., |
| CoVnb- | | (Alpaca) | (Alpaca) | | | | TYYYNCHPGA | | | 2020 |
| 110 | | | | | | | MHY | | | (https://www.biorxiv.or |
| | | | | | | | | | | g/content/10.1101/202 |
| | | | | | | | | | | 0.07.24.219857v1) |

| | | | | | Not | | | | | |
|---|---|---|---|---|---|---|---|---|---|---|
| | Ab | | | Neutral- | Neutral- | | | SEQ | | SEQ |
| | or | | Doesn't | ising | ising | Protein + | | ID | | ID |
| Name | Nb | Binds to | Bind to | Vs | Vs | Epitope | Origin | NO.: | VH or VHH | NO.: |
| NIH- | Nb | SARS-CoV2 | | | | S; RBD | Immunised Llama | 1010 | DVQLQESGGGSVEAGGSLRLSCAASGV | |
| CoVnb- | | | | | | | | | TLDYYAIGWFRQAPGKEREGVSCISSSD | |
| 111 | | | | | | | | | GSTYYADSVKGRFTTSRDNAKNTVYLQ | |
| | | | | | | | | | MNSLKPEDTADYYCAAVPSTYYSGTYYY | |
| | | | | | | | | | NCHPGAMHYWGKGTQVTVSS | |
| NIH- | Nb | SARS-CoV2 | | | | S; RBD | Immunised Llama | 1011 | DVQLQESGGGLVQPGGSLRLSCAASGL | |
| CoVnb- | | | | | | | | | TLDYYAIGWFRQAPGKEREGVSCISSSD | |
| 112 | | | | | | | | | GSTYYADSVKGRFTTSRDNAKNTVYLQ | |
| | | | | | | | | | MNSLKPEDTAVYYCAAVPSTYYSGTYYY | |
| | | | | | | | | | TCHPGGMDYWGKGTQVTVSS | |
| NIH- | Nb | SARS-CoV2 | | | | S; RBD | Immunised Llama | 1012 | DVQLQESGGGLVQPGGSLRLSCAASGL | |
| CoVnb- | | | | | | | | | TLDYYAIGWFRQAPGKEREGVSCISSSD | |
| 113 | | | | | | | | | GSTYYADSVKGRFTTSRDNAKNTVYLQ | |
| | | | | | | | | | MNSLKPEDTAVYYCAAVPSTYYSGTYYY | |
| | | | | | | | | | TCHPGGMDYWGKGTLVTVSS | |
| P2B-2F6 | Ab | SARS-CoV2 | SARS- | SARS-CoV2 | | S; RBD | B-cells; SARS-CoV2 | 1013 | QVQLQESGPGLVKPSETLSLTCTVSGYSI | 2055 |
| | | | CoV1 | | | | Human Patient | | SSGYYWGWIRQPPGKGLEWIGSIYHSG | |
| | | | | | | | | | STYYNPSLKTRVTISVDTSKNQFSLKLSSV | |
| | | | | | | | | | TAADTAVYYCARAVVGIVVVPAAGRRAF | |
| | | | | | | | | | DIWGQGTMVTVSS | |
| S110 | Ab | SARS-CoV1, | | SARS-Cov1 | | S; | B-cells; SARS-CoV1 | | ND | |
| | | SARS-CoV2 | | | | RBD + non- | Human Patient | | | |
| | | | | | | RBD | | | | |
| S124 | Ab | SARS-CoV1, | | SARS-CoV1 | | S; RBD | B-cells; SARS-CoV1 | | ND | |
| | | SARS-CoV2 | | | | | Human Patient | | | |
| S303 | Ab | SARS-CoV1, | | SARS-CoV1 | | S; RBD | B-cells; SARS-CoV1 | | ND | |
| | | SARS-CoV2 | | | | | Human Patient | | | |
| S304 | Ab | SARS-CoV1, | | SARS-CoV1, | | S; RBD | B-cells; SARS-CoV1 | | ND | |
| | | SARS-CoV2 | | SARS-CoV2 | | | Human Patient | | | |
| | | | | (weak) | | | | | | |
| S306 | Ab | SARS-CoV1, | | SARS-CoV1 | SARS-CoV2 | S; non- | B-cells; SARS-CoV1 | | ND | |
| | | SARS-CoV2 | | | | RBD | Human Patient | | | |
| S309 | Ab | SARS-CoV1, | | SARS-CoV2 | | S; RBD | B-cells; SARS-CoV1 | 1014 | QVQLVQSGAEVKKPGASVKVSCKASGY | 2056 |
| | | SARS-CoV2 | | and SARS- | | | Human Patient | | PFTSYGISWVRQAPGQGLEWMGWIST | |
| | | | | CoV1 | | | | | YNGNTNYAQKFQGRVTMTTDTSTTTGY | |
| | | | | | | | | | MELRRLRSDDTAVYYCARDYTRGAWFG | |
| | | | | | | | | | ESLIGGFDNWGQGTLVTVSS | |
| S310 | Ab | SARS-CoV1, | | SARS-CoV1 | | S; non- | B-cells; SARS-CoV1 | | ND | |
| | | SARS-CoV2 | | | | RBD | Human Patient | | | |
| S315 | Ab | SARS-CoV1, | | SARS-CoV2 | | S; RBD | B-cells; SARS-CoV1 | | ND | |
| | | SARS-CoV2 | | and SARS- | | | Human Patient | | | |
| Sb#1 | Nb | SARS-CoV2 | | | | S; RBD | Phage Display | 1015 | QVQLVESGGGLVQAGGSLRLSCAASGF | |
| | | | | | | | Library (Nanobody, | | PVRKANMHWYRQAPGKEREWVAAIM | |
| | | | | | | | non-immune) | | SKGEQTVYADSVEGRFTISRDNAKNTVY | |
| | | | | | | | | | LQMNSLKPEDTAVYYCRVFVGWHYFG | |
| | | | | | | | | | QGTQVTVS | |
| Sb#10 | Nb | SARS-CoV2 | | | | S; RBD | Phage Display | 1016 | QVQLVESGGGLVQAGGSLRLSCAASGF | |
| | | | | | | | Library (Nanobody, | | PVQSHYMRWYRQAPGKEREWVAAIES | |
| | | | | | | | non-immune) | | TGHHTAYADSVKGRFTISRDNAKNTVYL | |
| | | | | | | | | | QMNSLKPEDTAVYYCTVYVGYEYHGQG | |
| | | | | | | | | | TQVTVS | |
| Sb#11 | Nb | SARS-CoV2 | | | | S; RBD | Phage Display | 1017 | QVQLVESGGGLVQAGGSLRLSCAASGF | |
| | | | | | | | Library (Nanobody, | | PVETENMHWYRQAPGKEREWVAAIYS | |
| | | | | | | | non-immune) | | HGMWTAYADSVKGRFTISRDNTKNTVY | |
| | | | | | | | | | LQMNSLKPEDTAVYYCEVEVGKWYFGQ | |
| | | | | | | | | | GTQVTVS | |
| Sb#12 | Nb | SARS-CoV2 | | | | S; RBD | Phage Display | 1018 | QVQLVESGGGLVQAGGSLRLSCAASGF | |
| | | | | | | | Library (Nanobody, | | PVKASRMYWYRQAPGKEREWVAAIQS | |
| | | | | | | | non-immune) | | FGEVTWYADSVKGRFTISRDNAKNTVYL | |
| | | | | | | | | | QMNSLKPEDTAVYYCYVWVGQEYWG | |
| | | | | | | | | | QGTQVTVS | |

| | | | | | | SEQ | | SEQ | | |
|---|---|---|---|---|---|---|---|---|---|---|
| | | Heavy V | Heavy J | Light V | Light J | ID | | ID | | |
| Name | VL | Gene | Gene | Gene | Gene | NO.: | CDRH3 | NO.: | CDRL3 | Sources |
| NIH- | N/A | IGHV3-3 | IGHJ7 | N/A | N/A | 3124 | AAVPSTYYSG | | N/A | Thomas Esparza et al., |
| CoVnb- | | (Alpaca) | (Alpaca) | | | | TYYYNCHPGA | | | 2020 |
| 111 | | | | | | | MHY | | | (https://www.biorxiv.or |
| | | | | | | | | | | g/content/10.1101/202 |
| | | | | | | | | | | (0.07.24.219857v1) |
| NIH- | N/A | IGHV3-3 | IGHJ7 | N/A | N/A | 3125 | AAVPSTYYSG | | N/A | Thomas Esparza et al., |
| CoVnb- | | (Alpaca) | (Alpaca) | | | | TYYYTCHPGG | | | 2020 |
| 112 | | | | | | | MDY | | | (https://www.biorxiv.or |
| | | | | | | | | | | g/content/10.1101/202 |
| | | | | | | | | | | 0.07.24.219857v1) |
| NIH- | N/A | IGHV3-3 | IGHJ7 | N/A | N/A | 3126 | AAVPSTYYSG | | N/A | Thomas Esparza et al., |
| CoVnb- | | (Alpaca) | (Alpaca) | | | | TYYYTCHPGG | | | 2020 |
| 113 | | | | | | | MDY | | | (https://www.biorxiv.or |
| | | | | | | | | | | g/content/10.1101/202 |
| | | | | | | | | | | 0.07.24.219857v1) |
| P2B-2F6 | QSALTQPPSASGSPGQSVTISCTGTSS | IGHV4-38- | IGHJ3 | IGLV2-8 | IGLJ3 | 3127 | ARAVVGIVVV | 4292 | SSYAGSNN | Bin Ju et al., 2020 |
| | DVGGYNYVSWYQQHPGKAPKLMIYE | 2 | (Human) | (Human) | (Human) | | PAAGRRAFDI | | LV | (https://www.nature.co |
| | VSKRPSGVPDRFSGSKSGNTASLTVSG | (Human) | | | | | | | | m/articles/s41586-020- |
| | LQAEDEADYYCSSYAGSNNLVFGGGT | | | | | | | | | 2380-z) |
| | KLTVL | | | | | | | | | |
| S110 | ND | IGHV3-30 | ND | IGKV2-30 | ND | 3128 | AKDRFQFARS | 4293 | MQGTHW | Dora Pinto et al., 2020 |
| | | (Human) | | (Human) | | | WYGDYFDY | | PPT | (https://www.nature.co |
| | | | | | | | | | | m/articles/s41586-020- |
| | | | | | | | | | | 2349-y) |
| S124 | ND | IGHV2-26 | ND | IGKV1-39 | ND | 3129 | ARINTAAYDY | 4294 | QQSYSTPP | Dora Pinto et al., 2020 |
| | | (Human) | | (Human) | | | DSTTFDI | | T | (https://www.nature.co |
| | | | | | | | | | | m/articles/s41586-020- |
| | | | | | | | | | | 2349-y) |
| S303 | ND | IGHV3-23 | ND | IGKV1-5 | ND | 3130 | ARERDDIFPM | 4295 | QQYDTYS | Dora Pinto et al., 2020 |
| | | (Human) | | (Human) | | | GLNAFDI | | WT | (https://www.nature.co |
| | | | | | | | | | | m/articles/s41586-020- |
| | | | | | | | | | | 2349-y) |
| S304 | ND | IGHV3-13 | ND | IGKV1-39 | ND | 3131 | ARGDSSGYYY | 4296 | QQSYVSPT | Dora Pinto et al., 2020 |
| | | (Human) | | (Human) | | | YFDY | | YT | (https://www.nature.co |
| | | | | | | | | | | m/articles/s41586-020- |
| | | | | | | | | | | 2349-y) |
| S306 | ND | IGHV1-18 | ND | IGKV3-11 | ND | 3132 | ASDYFDSSGY | 4297 | QQRSNWP | Dora Pinto et al., 2020 |
| | | (Human) | | (Human) | | | YHSFDY | | PGCS | (https://www.nature.co |
| | | | | | | | | | | m/articles/s41586-020- |
| | | | | | | | | | | 2349-y) |
| S309 | EIVLTQSPGTLSLSPGERATLSCRASQT | IGHV1-18 | IGHJ4 | IGKV3-20 | IGKJ4 | 3133 | ARDYTRGAW | 4298 | QQHDTSLT | Dora Pinto et al., 2020 |
| | VSSTSLAWYQQKPGQAPRLLIYGASSR | (Human) | (Human) | (Human) | (Human) | | FGESLIGGFD | | | (https://www.nature.co |
| | ATGIPDRFSGSGSGTDFTLTISRLEPED | | | | | | N | | | m/articles/s41586-020- |
| | FAVYYCQQHDTSLTFGGGTKVEIK | | | | | | | | | 2349-y) |
| S310 | ND | IGHV1-69 | ND | IGLV2-23 | ND | 3134 | ATRTYDSSGY | 4299 | CSYAGSDT | Dora Pinto et al., 2020 |
| | | (Human) | | (Human) | | | RPYYYGLDV | | VI | (https://www.nature.co |
| | | | | | | | | | | m/articles/s41586-020- |
| | | | | | | | | | | 2349-y) |
| S315 | ND | IGHV3-7 | ND | IGLV3-25 | ND | 3135 | ARDLWWND | 4300 | QSADSSGT | Dora Pinto et al., 2020 |
| | | (Human) | | (Human) | | | QAHYYGMDV | | V | (https://www.nature.co |
| | | | | | | | | | | m/articles/s41586-020- |
| | | | | | | | | | | 2349-y) |
| Sb#1 | N/A | IGHV3-3 | IGHJ4 | N/A | N/A | 3136 | RVFVGWHY | | N/A | Justin Walter et al., |
| | | (Alpaca) | (Alpaca) | | | | | | | 2020 |
| | | | | | | | | | | (https://www.biorxiv.or |
| | | | | | | | | | | g/content/10.1101/202 |
| | | | | | | | | | | 0.04.16.045419v2) |
| Sb#10 | N/A | IGHV3-3 | IGHJ4 | N/A | N/A | 3137 | TVYVGYEY | | N/A | Justin Walter et al., |
| | | (Alpaca) | (Alpaca) | | | | | | | 2020 |
| | | | | | | | | | | (https://www.biorxiv.or |
| | | | | | | | | | | g/content/10.1101/202 |
| | | | | | | | | | | 0.04.16.045419v2) |
| Sb#11 | N/A | IGHV3-3 | IGHJ4 | N/A | N/A | 3138 | EVEVGKWY | | N/A | Justin Walter et al., |
| | | (Alpaca) | (Alpaca) | | | | | | | 2020 |
| | | | | | | | | | | (https://www.biorxiv.or |
| | | | | | | | | | | g/content/10.1101/202 |
| | | | | | | | | | | 0.04.16.045419v2) |
| Sb#12 | N/A | IGHV3-3 | IGHJ5 | N/A | N/A | 3139 | YVWVGQEY | | N/A | 2020 |
| | | (Alpaca) | (Alpaca) | | | | | | | Justin Walter et al., |
| | | | | | | | | | | (https://www.biorxiv.or |
| | | | | | | | | | | g/content/10.1101/202 |
| | | | | | | | | | | 0.04.16.045419v2) |

| | | | | | Not | | | | | |
|---|---|---|---|---|---|---|---|---|---|---|
| | Ab | | | Neutral- | Neutral- | | | SEQ | | SEQ |
| | or | | Doesn't | ising | ising | Protein + | | ID | | ID |
| Name | Nb | Binds to | Bind to | Vs | Vs | Epitope | Origin | NO.: | VH or VHH | NO.: |
| Sb#13 | Nb | SARS-CoV2 | | | | S; RBD | Phage Display | 1019 | QVQLVESGGGLVQAGGSLRLSCAASGF | |
| | | | | | | | Library (Nanobody, | | PVYASNMHWYRQAPGKEREWVAAIES | |
| | | | | | | | non-immune) | | QGYMTAYADSVKGRFTISRDNAKNTVY | |
| | | | | | | | | | LQMNSLKPEDTAVYYCWVIVGEYYVGQ | |
| | | | | | | | | | GTQVTVS | |
| Sb#14 | Nb | SARS-CoV2 | | | | S; RBD | Phage Display | 1020 | QVQLVESGGGLVQAGGSLRLSCAASGF | |
| | | | | | | | Library (Nanobody, | | PVQAREMEWYRQAPGKEREWVAAIKS | |
| | | | | | | | non-immune) | | TGTYTAYAYSVKGRFTISRDNAKNTVYLQ | |
| | | | | | | | | | MNSLKPEDTAVYYCYVYVGSSYIGQGTQ | |
| | | | | | | | | | VTVS | |
| Sb#15 | Nb | SARS-CoV2 | | | | S; RBD | Phage Display | 1021 | QVQLVESGGGLVQAGGSLRLSCAASGF | |
| | | | | | | | Library (Nanobody, | | PVKNFEMEWYRKAPGKEREWVAAIQS | |
| | | | | | | | non-immune) | | GGVETYYADSVKGRFTISRDNAKNTVYL | |
| | | | | | | | | | QMNSLKPEDTAVYYCFVYVGRSYIGQGT | |
| | | | | | | | | | QVTVS | |
| Sb#16 | Nb | SARS-CoV2 | | | | S; RBD | Phage Display | 1022 | QVQLVESGGGLVQAGGSLRLSCAASGF | |
| | | | | | | | Library (Nanobody, | | PVAYKTMWWYRQAPGKEREWVAAIES | |
| | | | | | | | non-immune) | | YGIKWTRYADSVKGRFTISRDNAKNTVY | |
| | | | | | | | | | LQMNSLKPEDTAVYYCIVWVGAQYHG | |
| | | | | | | | | | QGTQVTVS | |
| Sb#17 | Nb | SARS-CoV2 | | | | S; RBD | Phage Display | 1023 | QVQLVESGGGLVQAGGSLRLSCAASGF | |
| | | | | | | | Library (Nanobody, | | PVAGRNMWWYRQAPGKEREWVAAIY | |
| | | | | | | | non-immune) | | SSGTYTEYADSVKGRFTISRDNAKNTVYL | |
| | | | | | | | | | QMNSLKPEDTAVYYCHVWVGSLYKGQ | |
| | | | | | | | | | GTQVTVS | |
| Sb#18 | Nb | SARS-CoV2 | | | | S; RBD | Phage Display | 1024 | QVQLVESGGGLVQAGGSLRLSCAASGF | |
| | | | | | | | Library (Nanobody, | | PVKHARMWWYRQAPGKEREWVAAID | |
| | | | | | | | non-immune) | | SHGDTTWYADSVKGRFTISRDNAKNTV | |
| | | | | | | | | | YLQMNSLKPEDTAVYYCYVYVGASYWG | |
| | | | | | | | | | QGTQVTVS | |
| Sb#19 | Nb | SARS-CoV2 | | | | S; RBD | Phage Display | 1025 | QVQLVESGGGLVQAGGSLRLSCAASGF | |
| | | | | | | | Library (Nanobody, | | PVNSHEMTWYRQAPGKEREWVAAIQS | |
| | | | | | | | non-immune) | | TGTVTEYADSVKGRFTISRDNAKNTVYL | |
| | | | | | | | | | QMNSLKPEDTAVYYCYVYVGSSYLGQG | |
| | | | | | | | | | TQVTVS | |
| Sb#2 | Nb | SARS-CoV2 | | | | S; RBD | Phage Display | 1026 | QVQLVESGGGLVQAGGSLRLSCATSGF | |
| | | | | | | | Library (Nanobody, | | PVYQANMHWYRQAPGKEREWVAAIQ | |
| | | | | | | | non-immune) | | SYGDGTHYADSVKGRFTISRDNAKNTVY | |
| | | | | | | | | | LQMNSLKPEDTAVYYCRAVYVGMHYFG | |
| | | | | | | | | | QGTQVTVS | |
| Sb#20 | Nb | SARS-CoV2 | | | | S; RBD | Phage Display | 1027 | QVQLVESGGGLVQAGGSLRLSCAASGF | |
| | | | | | | | Library (Nanobody, | | PVEQREMEWYRQAPGKEREWVAAIDS | |
| | | | | | | | non-immune) | | NGNYTFYADSVKGRFTISRDNAKNTVYL | |
| | | | | | | | | | QMNSLKPEDTAVYYCYVYVGKSYIGQGT | |
| | | | | | | | | | QVTVS | |
| Sb#21 | Nb | SARS-CoV2 | | | | S; RBD | Phage Display | 1028 | QVQLVESGGGLVQAGGSLRLSCAASGF | |
| | | | | | | | Library (Nanobody, | | PVKHHWMFWYRQAPGKEREWVAAIK | |
| | | | | | | | non-immune) | | SYGYGTEYADSVKGRFTISRDNAKNTVYL | |
| | | | | | | | | | QMNSLKPEDTAVYYCFVGVGTHYAGQ | |
| | | | | | | | | | GTQVTVS | |
| Sb#22 | Nb | SARS-CoV2 | | | | S; RBD | Phage Display | 1029 | QVQLVESGGGLVQAGGSLRLSCAASGF | |
| | | | | | | | Library (Nanobody, | | PVYAAEMEWYRQAPGKEREWVAAISS | |
| | | | | | | | non-immune) | | QGTITYYADSVKGRFTISRDNAKNTVYLQ | |
| | | | | | | | | | MNSLKPEDTAVYYCFVYVGKSYIGQGTQ | |
| | | | | | | | | | VSVS | |
| Sb#23 | Nb | SARS-CoV2 | | | | S; RBD | Phage Display | 1030 | QVQLVESGGGLVQAGGSLRLSCAASGF | |
| | | | | | | | Library (Nanobody, | | PVYAAEMEWYRQAPGKEREWVAAISS | |
| | | | | | | | non-immune) | | QGTITYYADSVKGRFTISRDNAKNTVYLQ | |
| | | | | | | | | | MNSLKPEDTAVYYCFVYVGKSYIGQGTQ | |
| | | | | | | | | | VSVS | |
| Sb#25 | Nb | SARS-CoV2 | | | | S; RBD | Phage Display | 1031 | QVQLVESGGGLVQAGGSLRLSCAASGF | |
| | | | | | | | Library (Nanobody, | | PVHAWEMAWYRQAPGKEREWVAAIR | |
| | | | | | | | non-immune) | | SFGSSTHYADSVKGRFTISRDNAKNTVYL | |
| | | | | | | | | | QMNSLKPEDTAVYYCNVKDFGTHHYAY | |
| | | | | | | | | | DYWGQGTQVTVS | |
| Sb#26 | Nb | SARS-CoV2 | | | | S; RBD | Phage Display | 1032 | QVQLVESGGGLVQAGGSLRLSCAASGF | |
| | | | | | | | Library (Nanobody, | | PVNTWWMHWYRQAPGKEREWVAAIT | |
| | | | | | | | non-immune) | | SWGFRTYYADSVKGRFTISRDNAKNTVY | |
| | | | | | | | | | LQMNSLKPEDTAVYYCNVKDKGMAVQ | |
| | | | | | | | | | WYDYWGQGTQVTVS | |
| Sb#27 | Nb | SARS-CoV2 | | | | S; RBD | Phage Display | 1033 | QVQLVESGGGLVQAGGSLRLSCAASGF | |
| | | | | | | | Library (Nanobody, | | PVYNTWMEWYRQAPGKEREWVAAITS | |
| | | | | | | | non-immune) | | HGYKTYYADSVKGRFTISRDNAKNTVYL | |
| | | | | | | | | | QMNSLKPEDTAVYYCNVKDEGDMFTA | |
| | | | | | | | | | YDYWGQGTQVTVS | |

| | | | | | | SEQ | | SEQ | | |
|---|---|---|---|---|---|---|---|---|---|---|
| | | Heavy V | Heavy J | Light V | Light J | ID | | ID | | |
| Name | VL | Gene | Gene | Gene | Gene | NO.: | CDRH3 | NO.: | CDRL3 | Sources |
| Sb#13 | N/A | IGHV3-3 | IGHJ4 | N/A | N/A | 3140 | WVIVGEYY | | N/A | Justin Walter et al., |
| | | (Alpaca) | (Alpaca) | | | | | | | 2020 |
| | | | | | | | | | | (https://www.biorxiv.or |
| | | | | | | | | | | g/content/10.1101/202 |
| | | | | | | | | | | 0.04.16.045419v2) |
| Sb#14 | N/A | IGHV3-3 | IGHJ4 | N/A | N/A | 3141 | YVYVGSSY | | N/A | Justin Walter et al., |
| | | (Alpaca) | (Alpaca) | | | | | | | 2020 |
| | | | | | | | | | | (https://www.biorxiv.or |
| | | | | | | | | | | g/content/10.1101/202 |
| | | | | | | | | | | 0.04.16.045419v2) |
| Sb#15 | N/A | IGHV3-3 | IGHJ4 | N/A | N/A | 3142 | FVYVGRSY | | N/A | Justin Walter et al., |
| | | (Alpaca) | (Alpaca) | | | | | | | 2020 |
| | | | | | | | | | | (https://www.biorxiv.or |
| | | | | | | | | | | g/content/10.1101/202 |
| | | | | | | | | | | 0.04.16.045419v2) |
| Sb#16 | N/A | IGHV3S5 | IGHJ4 | N/A | N/A | 3143 | IVWVGAQY | | N/A | Justin Walter et al., |
| | | 3 | (Alpaca) | | | | | | | 2020 |
| | | (Alpaca) | | | | | | | | (https://www.biorxiv.or |
| | | | | | | | | | | g/content/10.1101/202 |
| | | | | | | | | | | 0.04.16.045419v2) |
| Sb#17 | N/A | IGHV3-3 | IGHJ4 | N/A | N/A | 3144 | HVWVGSLY | | N/A | Justin Walter et al., |
| | | (Alpaca) | (Alpaca) | | | | | | | 2020 |
| | | | | | | | | | | (https://www.biorxiv.or |
| | | | | | | | | | | g/content/10.1101/202 |
| | | | | | | | | | | 0.04.16.045419v2) |
| Sb#18 | N/A | IGHV3-3 | IGHJ4 | N/A | N/A | 3145 | YVYVGASY | | N/A | Justin Walter et al., |
| | | (Alpaca) | (Alpaca) | | | | | | | 2020 |
| | | | | | | | | | | (https://www.biorxiv.or |
| | | | | | | | | | | g/content/10.1101/202 |
| | | | | | | | | | | 0.04.16.045419v2) |
| Sb#19 | N/A | IGHV3-3 | IGHJ4 | N/A | N/A | 3146 | YVYVGSSY | | N/A | Justin Walter et al., |
| | | (Alpaca) | (Alpaca) | | | | | | | 2020 |
| | | | | | | | | | | (https://www.biorxiv.or |
| | | | | | | | | | | g/content/10.1101/202 |
| | | | | | | | | | | 0.04.16.045419v2) |
| Sb#2 | N/A | IGHV3-3 | IGHJ4 | N/A | N/A | 3147 | RAVYVGMHY | | N/A | Justin Walter et al., |
| | | (Alpaca) | (Alpaca) | | | | | | | 2020 |
| | | | | | | | | | | (https://www.biorxiv.or |
| | | | | | | | | | | g/content/10.1101/202 |
| | | | | | | | | | | 0.04.16.045419v2) |
| Sb#20 | N/A | IGHV3-3 | IGHJ4 | N/A | N/A | 3148 | YVYVGKSY | | N/A | Justin Walter et al., |
| | | (Alpaca) | (Alpaca) | | | | | | | 2020 |
| | | | | | | | | | | (https://www.biorxiv.or |
| | | | | | | | | | | g/content/10.1101/202 |
| | | | | | | | | | | 0.04.16.045419v2) |
| Sb#21 | N/A | IGHV3-3 | IGHJ4 | N/A | N/A | 3149 | FVGVGTHY | | N/A | Justin Walter et al., |
| | | (Alpaca) | (Alpaca) | | | | | | | 2020 |
| | | | | | | | | | | (https://www.biorxiv.or |
| | | | | | | | | | | g/content/10.1101/202 |
| | | | | | | | | | | 0.04.16.045419v2) |
| Sb#22 | N/A | IGHV3-3 | IGHJ4 | N/A | N/A | 3150 | FVYVGKSY | | N/A | Justin Walter et al., |
| | | (Alpaca) | (Alpaca) | | | | | | | 2020 |
| | | | | | | | | | | (https://www.biorxiv.or |
| | | | | | | | | | | g/content/10.1101/202 |
| | | | | | | | | | | 0.04.16.045419v2) |
| Sb#23 | N/A | IGHV3-3 | IGHJ4 | N/A | N/A | 3151 | FVYVGKSY | | N/A | Justin Walter et al., |
| | | (Alpaca) | (Alpaca) | | | | | | | 2020 |
| | | | | | | | | | | (https://www.biorxiv.or |
| | | | | | | | | | | g/content/10.1101/202 |
| | | | | | | | | | | 0.04.16.045419v2) |
| Sb#25 | N/A | IGHV3S5 | IGHJ4 | N/A | N/A | 3152 | NVKDFGTHH | | N/A | Justin Walter et al., |
| | | 3 | (Alpaca) | | | | YAYDY | | | 2020 |
| | | (Alpaca) | | | | | | | | (https://www.biorxiv.or |
| | | | | | | | | | | g/content/10.1101/202 |
| | | | | | | | | | | 0.04.16.045419v2) |
| Sb#26 | N/A | IGHV3S5 | IGHJ4 | N/A | N/A | 3153 | NVKDKGMAV | | N/A | Justin Walter et al., |
| | | 3 | (Alpaca) | | | | QWYDY | | | 2020 |
| | | (Alpaca) | | | | | | | | (https://www.biorxiv.or |
| | | | | | | | | | | g/content/10.1101/202 |
| | | | | | | | | | | 0.04.16.045419v2) |
| Sb#27 | N/A | IGHV3S5 | IGHJ4 | N/A | N/A | 3154 | NVKDEGDMF | | N/A | Justin Walter et al., |
| | | 3 | (Alpaca) | | | | TAYDY | | | 2020 |
| | | (Alpaca) | | | | | | | | (https://www.biorxiv.or |
| | | | | | | | | | | g/content/10.1101/202 |
| | | | | | | | | | | 0.04.16.045419v2) |

| | | | | | Not | | | | | |
|---|---|---|---|---|---|---|---|---|---|---|
| | Ab | | | Neutral- | Neutral- | | | SEQ | | SEQ |
| | or | | Doesn't | ising | ising | Protein + | | ID | | ID |
| Name | Nb | Binds to | Bind to | Vs | Vs | Epitope | Origin | NO.: | VH or VHH | NO.: |
| Sb#28 | Nb | SARS-CoV2 | | | | S; RBD | Phage Display | 1034 | QVQLVESGGGLVQAGGSLRLSCAASGF | |
| | | | | | | | Library (Nanobody, | | PVYHSTMFWYRQAPGKEREWVAAIYSS | |
| | | | | | | | non-immune) | | GQHTYYADSVKGRFTISRDNAKNTVYLQ | |
| | | | | | | | | | MNSLKPEDTAVYYCNVKDSGQWRQEY | |
| | | | | | | | | | DYWGQGTQVTVS | |
| Sb#29 | Nb | SARS-CoV2 | | | | S; RBD | Phage Display | 1035 | QVQLVESGGGLVQAGGSLRLSCAASGF | |
| | | | | | | | Library (Nanobody, | | PVEHEMAWYRQAPGKEREWVAAIRS | |
| | | | | | | | non-immune) | | MGRKTLYADSVKGRFTISRDNAKNTVYL | |
| | | | | | | | | | QMNSLKPEDTAVYYCNVKDFGYTWHEY | |
| | | | | | | | | | DYWGQGTQVTVS | |
| Sb#3 | Nb | SARS-CoV2 | | | | S; RBD | Phage Display | 1036 | QVQLVESGGGLVQAGGSLRLSCAASGF | |
| | | | | | | | Library (Nanobody, | | PVNYKTMWWYRQAPGKEREWVAAIW | |
| | | | | | | | non-immune) | | SYGHTTHYADSVKGRFTISRDNAKNTVY | |
| | | | | | | | | | LQMNSLKPEDTAVYYCVVWVGHNYEG | |
| | | | | | | | | | QGTQVTVS | |
| Sb#30 | Nb | SARS-CoV2 | | | | S; RBD | Phage Display | 1037 | QVQLVESGGGLVQAGGSLRLSCAASGF | |
| | | | | | | | Library (Nanobody, | | PVTMAWMWWYRQAPGKEREWVAAI | |
| | | | | | | | non-immune) | | RSEGVRTYYADSVKGRFTISRDNAKNTV | |
| | | | | | | | | | YLQMNSLKPEDTAVYYCNVKDYGQAHA | |
| | | | | | | | | | YYDYWGQGTQVTVS | |
| Sb#31 | Nb | SARS-CoV2 | | | | S; RBD | Phage Display | 1038 | QVQLVESGGGLVQAGGSLRLSCAASGF | |
| | | | | | | | Library (Nanobody, | | PVNSHFMEWYRQAPGKEREWVAAIQH | |
| | | | | | | | non-immune) | | SSGFHTYYADSVKGRFTISRDNAKNTVYL | |
| | | | | | | | | | QMNSLKPEDTAVYYCNVKDTGTTEDYD | |
| | | | | | | | | | YWGQGTQVTVS | |
| Sb#32 | Nb | SARS-CoV2 | | | | S; RBD | Phage Display | 1039 | QVQLDESGGGLVQAGGSLRLSCAASGF | |
| | | | | | | | Library (Nanobody, | | PVYHAWMEWYRQAPGKEREWVAAITS | |
| | | | | | | | non-immune) | | SGRHTYYADSVKGRFTISRDNAKNTVYL | |
| | | | | | | | | | QMNSLKPEDTAVYYCNVKDAGRVYNSY | |
| | | | | | | | | | DYWGQGTQVTVS | |
| Sb#33 | Nb | SARS-CoV2 | | | | S; RBD | Phage Display | 1040 | QVQLVESGGGLVQAGGSLRLSCAASGF | |
| | | | | | | | Library (Nanobody, | | PVAHAWMEWYRQAPGKEREWVAAIT | |
| | | | | | | | non-immune) | | SYGYKTYYADSVKGRFTISRDNAKNTVYL | |
| | | | | | | | | | QMNSLKPEDTAVYYCNVKDTGTYRFYY | |
| | | | | | | | | | DYWGQGTQVTVS | |
| Sb#34 | Nb | SARS-CoV2 | | | | S; RBD | Phage Display | 1041 | QVQLVESGGGLVQAGGSLRLSCAASGF | |
| | | | | | | | Library (Nanobody, | | PVWNQTMVWYRQAPGKEREWVAAI | |
| | | | | | | | non-immune) | | WSMGHTYYADSVKGRFTISRDNAKNTV | |
| | | | | | | | | | YLQMNSLKPEDTAVYYCNVKDAGVYNR | |
| | | | | | | | | | YYDYWGQGTQVTVS | |
| Sb#35 | Nb | SARS-CoV2 | | | | S; RBD | Phage Display | 1042 | QVQLVESGGGLVQAGGSLRLSCAASGF | |
| | | | | | | | Library (Nanobody, | | PVEHYWMEWYRQAPGKEREWVAAITS | |
| | | | | | | | non-immune) | | FGYRTYYADSVKGRFTISRDNAKNTVYL | |
| | | | | | | | | | QMNSLKPEDTAVYYCNVKDWGFASHA | |
| | | | | | | | | | YDYWGQGIQVTVS | |
| Sb#36 | Nb | SARS-CoV2 | | | | S; RBD | Phage Display | 1043 | QVQLVESGGGLVQAGGSLRLSCAASGF | |
| | | | | | | | Library (Nanobody, | | PEIAWEMAWYRQAPGKEREWVAAIRS | |
| | | | | | | | non-immune) | | FGERTLYADSVKGRFTISRDNAKNTVYL | |
| | | | | | | | | | QMNSLKPEDTAVYYCNVKDFGWQHQE | |
| | | | | | | | | | YDYWGQGTQVTVS | |
| Sb#37 | Nb | SARS-CoV2 | | | | S; RBD | Phage Display | 1044 | QVQLVESGGGLVQAGGSLRLSCAASGF | |
| | | | | | | | Library (Nanobody, | | PVYHAYMEWYRQAPGKEREWVAAIYS | |
| | | | | | | | non-immune) | | NGEHTYYADSVKGRFTISRDNAKNTVYL | |
| | | | | | | | | | QMNSLKPEDTAVYYCNVKDSGSFNQAY | |
| | | | | | | | | | DYWGQGTQVTVS | |
| Sb#38 | Nb | SARS-CoV2 | | | | S; RBD | Phage Display | 1045 | QVQLVESGGGLVQAGGSLRLSCAASGF | |
| | | | | | | | Library (Nanobody, | | PVEWSHMHWYRQAPGKEREWVAAIV | |
| | | | | | | | non-immune) | | SKGGYTLYADSVKGRFTISRDNAKNTVYL | |
| | | | | | | | | | QMNSLKPEDTAVYYCNVKDYGVHFKRY | |
| | | | | | | | | | DYWGQGTQVTVI | |
| Sb#39 | Nb | SARS-CoV2 | | | | S; RBD | Phage Display | 1046 | QVQLVESGGGLVQAGGSLRLSCAASGF | |
| | | | | | | | Library (Nanobody, | | PVFHVWMEWYRQAPGKEREWVAAID | |
| | | | | | | | non-immune) | | SAGWHTYYADSVKGRFTISRDNAKNTV | |
| | | | | | | | | | YLQMNSLKPEDTAVYYCNVKDAGNTTS | |
| | | | | | | | | | AYDYWGQGTQVTVS | |
| Sb#4 | Nb | SARS-CoV2 | | | | S; RBD | Phage Display | 1047 | QVQLVESGGGLVQAGGSLRLSCAASGF | |
| | | | | | | | Library (Nanobody, | | PVYAQNMHWYRQAPGKEREWVAAIYS | |
| | | | | | | | non-immune) | | HGYWTLYADSVKGRFTISRDNAKNTVYL | |
| | | | | | | | | | QMNSLKPEDTAVYYCEVQVGAWYTGQ | |
| | | | | | | | | | GTQVTVS | |
| Sb#40 | Nb | SARS-CoV2 | | | | S; RBD | Phage Display | 1048 | QVQLVESGGGLVQAGGSLRLSCAASGF | |
| | | | | | | | Library (Nanobody, | | PVYYNWMEWYRQAPGKEREWVAAIH | |
| | | | | | | | non-immune) | | SNGDETFYADSVKGRFTISRDNAKNTVY | |
| | | | | | | | | | LQMNSLKPEDTAVYYCNVKDIDAEAYAY | |
| | | | | | | | | | DYWGQGTQVTVS | |

| | | | | | | SEQ | | SEQ | | |
|---|---|---|---|---|---|---|---|---|---|---|
| | | Heavy V | Heavy J | Light V | Light J | ID | | ID | | |
| Name | VL | Gene | Gene | Gene | Gene | NO.: | CDRH3 | NO.: | CDRL3 | Sources |
| Sb#28 | N/A | IGHV3-3 | IGHJ4 | N/A | N/A | 3155 | NVKDSGQWR | | N/A | Justin Walter et al., |
| | | (Alpaca) | (Alpaca) | | | | QEYDY | | | 2020 |
| | | | | | | | | | | (https://www.biorxiv.or |
| | | | | | | | | | | g/content/10.1101/202 |
| | | | | | | | | | | 0.04.16.045419v2) |
| Sb#29 | N/A | IGHV3S5 | IGHJ4 | N/A | N/A | 3156 | NVKDFGYTW | | N/A | Justin Walter et al., |
| | | 3 | (Alpaca) | | | | HEYDY | | | 2020 |
| | | (Alpaca) | | | | | | | | (https://www.biorxiv.or |
| | | | | | | | | | | g/content/10.1101/202 |
| | | | | | | | | | | 0.04.16.045419v2) |
| Sb#3 | N/A | IGHV3-3 | IGHJ4 | N/A | N/A | 3157 | VVWVGHNY | | N/A | Justin Walter et al., |
| | | (Alpaca) | (Alpaca) | | | | | | | 2020 |
| | | | | | | | | | | (https://www.biorxiv.or |
| | | | | | | | | | | g/content/10.1101/202 |
| | | | | | | | | | | 0.04.16.045419v2) |
| Sb#30 | N/A | IGHV3-3 | IGHJ4 | N/A | N/A | 3158 | NVKDYGQAH | | N/A | Justin Walter et al., |
| | | (Alpaca) | (Alpaca) | | | | AYYDY | | | 2020 |
| | | | | | | | | | | (https://www.biorxiv.or |
| | | | | | | | | | | g/content/10.1101/202 |
| | | | | | | | | | | 0.04.16.045419v2) |
| Sb#31 | N/A | IGHV3-3 | IGHJ4 | N/A | N/A | 3159 | NVKDTGTTED | | N/A | Justin Walter et al., |
| | | (Alpaca) | (Alpaca) | | | | YDY | | | 2020 |
| | | | | | | | | | | (https://www.biorxiv.or |
| | | | | | | | | | | g/content/10.1101/202 |
| | | | | | | | | | | 0.04.16.045419v2) |
| Sb#32 | N/A | IGHV3-3 | IGHJ4 | N/A | N/A | 3160 | NVKDAGRVY | | N/A | Justin Walter et al., |
| | | (Alpaca) | (Alpaca) | | | | NSYDY | | | 2020 |
| | | | | | | | | | | (https://www.biorxiv.or |
| | | | | | | | | | | g/content/10.1101/202 |
| | | | | | | | | | | 0.04.16.045419v2) |
| Sb#33 | N/A | IGHV3S5 | IGHJ4 | N/A | N/A | 3161 | NVKDTGTYRF | | N/A | Justin Walter et al., |
| | | 3 | (Alpaca) | | | | YYDY | | | 2020 |
| | | (Alpaca) | | | | | | | | (https://www.biorxiv.or |
| | | | | | | | | | | g/content/10.1101/202 |
| | | | | | | | | | | 0.04.16.045419v2) |
| Sb#34 | N/A | IGHV3S5 | IGHJ4 | N/A | N/A | 3162 | NVKDAGVYN | | N/A | Justin Walter et al., |
| | | 3 | (Alpaca) | | | | RYYDY | | | 2020 |
| | | (Alpaca) | | | | | | | | (https://www.biorxiv.or |
| | | | | | | | | | | g/content/10.1101/202 |
| | | | | | | | | | | 0.04.16.045419v2) |
| Sb#35 | N/A | IGHV3-3 | IGHJ4 | N/A | N/A | 3163 | NVKDWGFAS | | N/A | Justin Walter et al., |
| | | (Alpaca) | (Alpaca) | | | | HAYDY | | | 2020 |
| | | | | | | | | | | (https://www.biorxiv.or |
| | | | | | | | | | | g/content/10.1101/202 |
| | | | | | | | | | | 0.04.16.045419v2) |
| Sb#36 | N/A | IGHV3S5 | IGHJ4 | N/A | N/A | 3164 | NVKDFGWQ | | N/A | Justin Walter et al., |
| | | 3 | (Alpaca) | | | | HQEYDY | | | 2020 |
| | | (Alpaca) | | | | | | | | (https://www.biorxiv.or |
| | | | | | | | | | | g/content/10.1101/202 |
| | | | | | | | | | | 0.04.16.045419v2) |
| Sb#37 | N/A | IGHV3-3 | IGHJ4 | N/A | N/A | 3165 | NVKDSGSFN | | N/A | Justin Walter et al., |
| | | (Alpaca) | (Alpaca) | | | | QAYDY | | | 2020 |
| | | | | | | | | | | (https://www.biorxiv.or |
| | | | | | | | | | | g/content/10.1101/202 |
| | | | | | | | | | | 0.04.16.045419v2) |
| Sb#38 | N/A | IGHV3S5 | IGHJ4 | N/A | N/A | 3166 | NVKDYGVHF | | N/A | Justin Walter et al., |
| | | 3 | (Alpaca) | | | | KRYDY | | | 2020 |
| | | (Alpaca) | | | | | | | | (https://www.biorxiv.or |
| | | | | | | | | | | g/content/10.1101/202 |
| | | | | | | | | | | 0.04.16.045419v2) |
| Sb#39 | N/A | IGHV3-3 | IGHJ4 | N/A | N/A | 3167 | NVKDAGNTT | | N/A | Justin Walter et al., |
| | | (Alpaca) | (Alpaca) | | | | SAYDY | | | 2020 |
| | | | | | | | | | | (https://www.biorxiv.or |
| | | | | | | | | | | g/content/10.1101/202 |
| | | | | | | | | | | 0.04.16.045419v2) |
| Sb#4 | N/A | IGHV3-3 | IGHJ4 | N/A | N/A | 3168 | EVQVGAWY | | N/A | Justin Walter et al., |
| | | (Alpaca) | (Alpaca) | | | | | | | 2020 |
| | | | | | | | | | | (https://www.biorxiv.or |
| | | | | | | | | | | g/content/10.1101/202 |
| | | | | | | | | | | 0.04.16.045419v2) |
| Sb#40 | N/A | IGHV3S5 | IGHJ4 | N/A | N/A | 3169 | NVKDIDAEAY | | N/A | Justin Walter et al., |
| | | 3 | (Alpaca) | | | | AYDY | | | 2020 |
| | | (Alpaca) | | | | | | | | (https://www.biorxiv.or |
| | | | | | | | | | | g/content/10.1101/202 |
| | | | | | | | | | | 0.04.16.045419v2) |

| | | | | | Not | | | | | |
|---|---|---|---|---|---|---|---|---|---|---|
| | Ab | | | Neutral- | Neutral- | | | SEQ | | SEQ |
| | or | | Doesn't | ising | ising | Protein + | | ID | | ID |
| Name | Nb | Binds to | Bind to | Vs | Vs | Epitope | Origin | NO.: | VH or VHH | NO.: |
| Sb#41 | Nb | SARS-CoV2 | | | | S; RBD | Phage Display | 1049 | QVQLVESGGGLVQAGGSLRLSCAASGF | |
| | | | | | | | Library (Nanobody, | | PVYHVWMEWYRQAPGKEREWVAAITS | |
| | | | | | | | non-immune) | | SGSHTYYADSVKGRFTISRDNAKNTVYL | |
| | | | | | | | | | QMNSLKPEDTAVYYCNVKDSGQWRVQ | |
| | | | | | | | | | YDYWGQGTQVTVS | |
| Sb#42 | Nb | SARS-CoV2 | | | | S; RBD | Phage Display | 1050 | QVQLVESGGGLVQAGGSLRLSCAASGF | |
| | | | | | | | Library (Nanobody, | | PVYWHHMHWYRQAPGKEREWVAAIIS | |
| | | | | | | | non-immune) | | WGWYTTYADSVKGRFTISRDNAKNTVY | |
| | | | | | | | | | LQMNSLKPEDTAVYYCNVKDHGAQNQ | |
| | | | | | | | | | MYDYWGQGTQVTVS | |
| Sb#45 | Nb | SARS-CoV2 | | | | S; RBD | Phage Display | 1051 | QVQLVESGGGLVQAGGSLRLSCAASGF | |
| | | | | | | | Library (Nanobody, | | PVYRDRMAWYRQAPGKEREWVAAIYS | |
| | | | | | | | non-immune) | | AGQQTRYADSVKGRFTISRDNAKNTVYL | |
| | | | | | | | | | QMNSLKPEDTAVYYCNVKDVGHHYEYY | |
| | | | | | | | | | DYWGQGTQVTVS | |
| Sb#46 | Nb | SARS-CoV2 | | | | S; RBD | Phage Display | 1052 | QVQLVESGGGLVQAGGSLRLSCAASGF | |
| | | | | | | | Library (Nanobody, | | PVDNGYMHWYRQAPGKEREWVAAID | |
| | | | | | | | non-immune) | | SYGWHTIYADSVKGRFTISRDNAKNTVY | |
| | | | | | | | | | LQMNSLKPEDTAVYYCNVKDKGQMRA | |
| | | | | | | | | | AYDYWGQGTQVTVS | |
| Sb#47 | Nb | SARS-CoV2 | | | | S; RBD | Phage Display | 1053 | QVQLVESGGGLVQAGGSLRLSCAASGF | |
| | | | | | | | Library (Nanobody, | | PVSWHSMYWYRQAPGKEREWVAAIFS | |
| | | | | | | | non-immune) | | EGDWTYYADSVKGRFTISRDNAKNTVYL | |
| | | | | | | | | | QMNSLKPEDTAVYYCNVKDYGSSYYKY | |
| | | | | | | | | | DYWGQGTQVTVS | |
| Sb#48 | Nb | SARS-CoV2 | | | | S; RBD | Phage Display | 1054 | QVQLVESGGGLVQAGGSLRLSCAASGF | |
| | | | | | | | Library (Nanobody, | | PVSQSVMAWYRQAPGKEREWVAAIYS | |
| | | | | | | | non-immune) | | KGQYTHYADSVKGRFTISRDNAKNTVYL | |
| | | | | | | | | | QMNSLKPEDTAVYYCNVKDAGSSYWD | |
| | | | | | | | | | YDYWGQGTQVTVS | |
| Sb#49 | Nb | SARS-CoV2 | | | | S; RBD | Phage Display | 1055 | QVQLVESGGGSVQAGGSLRLSCAASGSI | |
| | | | | | | | Library (Nanobody, | | GQIEYLGWFRQAPGKEREGVAALNTW | |
| | | | | | | | non-immune) | | TGRTYYADSVKGRFTVSLDNAKNTVYLQ | |
| | | | | | | | | | MNSLKPEDTALYYCAAARWGRTKPLNT | |
| | | | | | | | | | YYYSYWGQGTPVTVS | |
| Sb#5 | Nb | SARS-CoV2 | | | | S; RBD | Phage Display | 1056 | QVQLVESGGGLVQAGGSLRLSCAASGF | |
| | | | | | | | Library (Nanobody, | | PVFSGHMHWYRQAPGKEREWVAAILS | |
| | | | | | | | non-immune) | | NGDSTHYADSVKGRFTISRDNAKNTVYL | |
| | | | | | | | | | QMNSLKPEDTAVYYCRVHVGAHYFGQ | |
| | | | | | | | | | GTQVTVS | |
| Sb#50 | Nb | SARS-CoV2 | | | | S; RBD | Phage Display | 1057 | QVQLVESGGGSVQAGGSLRLSCAASGYI | |
| | | | | | | | Library (Nanobody, | | DKIVYLGWFRQAPGKEREGVAALYTLSG | |
| | | | | | | | non-immune) | | HTYYADSVKGRFTVSLDNAKNTVYLQM | |
| | | | | | | | | | NSLKPEDTALYYCAAATEGHAHALYRLH | |
| | | | | | | | | | YYWGQGTQVTVS | |
| Sb#51 | Nb | SARS-CoV2 | | | | S; RBD | Phage Display | 1058 | QVQLVESGGGLVQAGGSLRLSCAASGF | |
| | | | | | | | Library (Nanobody, | | PVYQGEMHWYRQAPGKEREWVAAIRS | |
| | | | | | | | non-immune) | | TGVQTWYADSVKGRFTISRDNAKNTVY | |
| | | | | | | | | | LQMNSLKPEDTAVYYCRVWVGTHYFG | |
| | | | | | | | | | QGTQVTVS | |
| Sb#52 | Nb | SARS-CoV2 | | | | S; RBD | Phage Display | 1059 | QVQLVESGGGSVQAGGSLRLSCAASGN | |
| | | | | | | | Library (Nanobody, | | IQRIYYLGWFRQAPGKEREGVAALMTYT | |
| | | | | | | | non-immune) | | GHTYYADSVKGRFTVSLDNAKNTVYLQ | |
| | | | | | | | | | MNSLKPEDTALYYCAAAYVGAENPLPYS | |
| | | | | | | | | | MYGYWGQGTQVTVS | |
| Sb#53 | Nb | SARS-CoV2 | | | | S; RBD | Phage Display | 1060 | QVQLVESGGGSVQAGGSLRLSCAASGQ | |
| | | | | | | | Library (Nanobody, | | ISHIKYLGWFRQAPGKEREGVAALITRW | |
| | | | | | | | non-immune) | | GQTYYADSVKGRFTVSLDNAKNTVYLQ | |
| | | | | | | | | | MNSLKPEDTALYYCAAADYGASDPLWFI | |
| | | | | | | | | | HYLYWGQGTQVTVS | |
| Sb#55 | Nb | SARS-CoV2 | | | | S; RBD | Phage Display | 1061 | QVQLVESGGGSVQAGGSLRLSCAASGKI | |
| | | | | | | | Library (Nanobody, | | WTIKYLGWFRQAPGKEREGVAALMTR | |
| | | | | | | | non-immune) | | WGYTYYADSVKGRFTVSLDNAKNTVYL | |
| | | | | | | | | | QMNSLKPEDTALYYCAAANYGSNFPLAE | |
| | | | | | | | | | EDYWYWGQGTQVTVS | |
| Sb#56 | Nb | SARS-CoV2 | | | | S; RBD | Phage Display | 1062 | QVQLVESGGGSVQAGGSLRLSCAASGN | |
| | | | | | | | Library (Nanobody, | | ISQIHYLGWFRQAPGKEREGVAALNTDY | |
| | | | | | | | non-immune) | | GYTYYADSVKGRFTVSLDNAKNTVYLQ | |
| | | | | | | | | | MNSLKPEDTALYYCAAAYYFGDDIPLW | |
| | | | | | | | | | WEAYSYWGQGTQVTVS | |
| Sb#58 | Nb | SARS-CoV2 | | | | S; RBD | Phage Display | 1063 | QVQLVESGGGSVQAGGSLRLSCAASGN | |
| | | | | | | | Library (Nanobody, | | ISTIEYLGWFRQAPGKEREGVAALYTWH | |
| | | | | | | | non-immune) | | GQTYYADSVKGRFTVSLDNAKNTVYLQ | |
| | | | | | | | | | MNSLKPEDTALYYCAAARWGRHMPLS | |
| | | | | | | | | | ATEYSYWGQGTQVTVS | |

| | | | | | | SEQ | | SEQ | | |
|---|---|---|---|---|---|---|---|---|---|---|
| | | Heavy V | Heavy J | Light V | Light J | ID | | ID | | |
| Name | VL | Gene | Gene | Gene | Gene | NO.: | CDRH3 | NO.: | CDRL3 | Sources |
| Sb#41 | N/A | IGHV3-3 | IGHJ4 | N/A | N/A | 3170 | NVKDSGQWR | | N/A | Justin Walter et al., |
| | | (Alpaca) | (Alpaca) | | | | VQYDY | | | 2020 |
| | | | | | | | | | | (https://www.biorxiv.or |
| | | | | | | | | | | g/content/10.1101/202 |
| | | | | | | | | | | 0.04.16.045419v2) |
| Sb#42 | N/A | IGHV3S5 | IGHJ4 | N/A | N/A | 3171 | NVKDHGAQN | | N/A | Justin Walter et al., |
| | | 3 | (Alpaca) | | | | QMYDY | | | 2020 |
| | | (Alpaca) | | | | | | | | (https://www.biorxiv.or |
| | | | | | | | | | | g/content/10.1101/202 |
| | | | | | | | | | | 0.04.16.045419v2) |
| Sb#45 | N/A | IGHV3S5 | IGHJ4 | N/A | N/A | 3172 | NVKDVGHHY | | N/A | Justin Walter et al., |
| | | 3 | (Alpaca) | | | | EYYDY | | | 2020 |
| | | (Alpaca) | | | | | | | | (https://www.biorxiv.or |
| | | | | | | | | | | g/content/10.1101/202 |
| | | | | | | | | | | 0.04.16.045419v2) |
| Sb#46 | N/A | IGHV3S5 | IGHJ4 | N/A | N/A | 3173 | NVKDKGQM | | N/A | Justin Walter et al., |
| | | 3 | (Alpaca) | | | | RAAYDY | | | 2020 |
| | | (Alpaca) | | | | | | | | (https://www.biorxiv.or |
| | | | | | | | | | | g/content/10.1101/202 |
| | | | | | | | | | | 0.04.16.045419v2) |
| Sb#47 | N/A | IGHV3-3 | IGHJ4 | N/A | N/A | 3174 | NVKDYGSSYY | | N/A | Justin Walter et al., |
| | | (Alpaca) | (Alpaca) | | | | KYDY | | | 2020 |
| | | | | | | | | | | (https://www.biorxiv.or |
| | | | | | | | | | | g/content/10.1101/202 |
| | | | | | | | | | | 0.04.16.045419v2) |
| Sb#48 | N/A | IGHV3S5 | IGHJ4 | N/A | N/A | 3175 | NVKDAGSSY | | N/A | Justin Walter et al., |
| | | 3 | (Alpaca) | | | | WDYD | | | 2020 |
| | | (Alpaca) | | | | | | | | (https://www.biorxiv.or |
| | | | | | | | | | | g/content/10.1101/202 |
| | | | | | | | | | | 0.04.16.045419v2) |
| Sb#49 | N/A | IGHV3-3 | IGHJ4 | N/A | N/A | 3176 | AAARWGRTK | | N/A | Justin Walter et al., |
| | | (Alpaca) | (Alpaca) | | | | PLNTYYYSY | | | 2020 |
| | | | | | | | | | | (https://www.biorxiv.or |
| | | | | | | | | | | g/content/10.1101/202 |
| | | | | | | | | | | 0.04.16.045419v2) |
| Sb#5 | N/A | IGHV3-3 | IGHJ4 | N/A | N/A | 3177 | RVHVGAHY | | N/A | Justin Walter et al., |
| | | (Alpaca) | (Alpaca) | | | | | | | 2020 |
| | | | | | | | | | | (https://www.biorxiv.or |
| | | | | | | | | | | g/content/10.1101/202 |
| | | | | | | | | | | 0.04.16.045419v2) |
| Sb#50 | N/A | IGHV3-3 | IGHJ4 | N/A | N/A | 3178 | AAATEGHAH | | N/A | Justin Walter et al., |
| | | (Alpaca) | (Alpaca) | | | | ALYRLHYY | | | 2020 |
| | | | | | | | | | | (https://www.biorxiv.or |
| | | | | | | | | | | g/content/10.1101/202 |
| | | | | | | | | | | 0.04.16.045419v2) |
| Sb#51 | N/A | IGHV3-3 | IGHJ4 | N/A | N/A | 3179 | RVWVGTHY | | N/A | Justin Walter et al., |
| | | (Alpaca) | (Alpaca) | | | | | | | 2020 |
| | | | | | | | | | | (https://www.biorxiv.or |
| | | | | | | | | | | g/content/10.1101/202 |
| | | | | | | | | | | 0.04.16.045419v2) |
| Sb#52 | N/A | IGHV3-3 | IGHJ4 | N/A | N/A | 3180 | AAAYVGAEN | | N/A | Justin Walter et al., |
| | | (Alpaca) | (Alpaca) | | | | PLPYSMYGY | | | 2020 |
| | | | | | | | | | | (https://www.biorxiv.or |
| | | | | | | | | | | g/content/10.1101/202 |
| | | | | | | | | | | 0.04.16.045419v2) |
| Sb#53 | N/A | IGHV3-3 | IGHJ4 | N/A | N/A | 3181 | AAADYGASD | | N/A | Justin Walter et al., |
| | | (Alpaca) | (Alpaca) | | | | PLWFIHYLY | | | 2020 |
| | | | | | | | | | | (https://www.biorxiv.or |
| | | | | | | | | | | g/content/10.1101/202 |
| | | | | | | | | | | 0.04.16.045419v2) |
| Sb#55 | N/A | IGHV3-3 | IGHJ4 | N/A | N/A | 3182 | AAANYGSNFP | | N/A | Justin Walter et al., |
| | | (Alpaca) | (Alpaca) | | | | LAEEDYWY | | | 2020 |
| | | | | | | | | | | (https://www.biorxiv.or |
| | | | | | | | | | | g/content/10.1101/202 |
| | | | | | | | | | | 0.04.16.045419v2) |
| Sb#56 | N/A | IGHV3-3 | IGHJ4 | N/A | N/A | 3183 | AAAYYFGDDI | | N/A | Justin Walter et al., |
| | | (Alpaca) | (Alpaca) | | | | PLWWEAYSY | | | 2020 |
| | | | | | | | | | | (https://www.biorxiv.or |
| | | | | | | | | | | g/content/10.1101/202 |
| | | | | | | | | | | 0.04.16.045419v2) |
| Sb#58 | N/A | IGHV3-3 | IGHJ4 | N/A | N/A | 3184 | AAARWGRH | | N/A | Justin Walter et al., |
| | | (Alpaca) | (Alpaca) | | | | MPLSATEYSY | | | 2020 |
| | | | | | | | | | | (https://www.biorxiv.or |
| | | | | | | | | | | g/content/10.1101/202 |
| | | | | | | | | | | 0.04.16.045419v2) |

| | | | | | Not | | | | | |
|---|---|---|---|---|---|---|---|---|---|---|
| | Ab | | | Neutral- | Neutral- | | | SEQ | | SEQ |
| | or | | Doesn't | ising | ising | Protein + | | ID | | ID |
| Name | Nb | Binds to | Bind to | Vs | Vs | Epitope | Origin | NO.: | VH or VHH | NO.: |
| Sb#59 | Nb | SARS-CoV2 | | | | S; RBD | Phage Display | 1064 | QVQLVESGGGSVQAGGSLRLSCAASGN | |
| | | | | | | | Library (Nanobody, | | IESIYYLGWFRQAPGKEREGVAALWTG | |
| | | | | | | | non-immune) | | DGETYYADSVKGRFTVSLDNAKNTVYLQ | |
| | | | | | | | | | MNSLKPEDTALYYCAAAAWGNSAPLTT | |
| | | | | | | | | | YRYYYWGQGTQVTVS | |
| Sb#6 | Nb | SARS-CoV2 | | | | S; RBD | Phage Display | 1065 | QVQLVESGGGLVQAGGSLRLSCAASGF | |
| | | | | | | | Library (Nanobody, | | PVEQGRMYWYRQAPGKEREWVAAIIS | |
| | | | | | | | non-immune) | | HGTVTVYADSVKGRFTISRDNAKNTVYL | |
| | | | | | | | | | QMNSLKPEDTAVYYCYVYVGAQYWGQ | |
| | | | | | | | | | GTQVTVS | |
| Sb#61 | Nb | SARS-CoV2 | | | | S; RBD | Phage Display | 1066 | QVQLVESGGGSVQAGGSLRLSCAASGFI | |
| | | | | | | | Library (Nanobody, | | YGITYLGWFRQAPGKEREGVAALVTWN | |
| | | | | | | | non-immune) | | GQTYYADSVKGRFTVSLDNAKNTVYLQ | |
| | | | | | | | | | MNSLKPEDTALYYCAAADWGYDWPLW | |
| | | | | | | | | | DEWYWYWGQGTQVTVS | |
| Sb#62 | Nb | SARS-CoV2 | | | | S; RBD | Phage Display | 1067 | QVQLVESGGGSVQAGGSLRLSCAASGTI | |
| | | | | | | | Library (Nanobody, | | ADIKYLGWFRQAPGKEREGVAALMTR | |
| | | | | | | | non-immune) | | WGSTYYADSVKGRFTVSLDNAKNTVYL | |
| | | | | | | | | | QMNSLKPEDTALYYCAAANYGANYPLYS | |
| | | | | | | | | | QQYSYWGQGTQVTVS | |
| Sb#63 | Nb | SARS-CoV2 | | | | S; RBD | Phage Display | 1068 | QVQLVESGGGSVQAGGSLRLSCAASGSI | |
| | | | | | | | Library (Nanobody, | | SSIKYLGWFRQAPGKEREGVAALMTRW | |
| | | | | | | | non-immune) | | GMTYYADSVKGRFTVSLDNAKNTVYLQ | |
| | | | | | | | | | MNSLKPEDTALYYCAAANYGANEPLQY | |
| | | | | | | | | | THYNYWGQGTQVTVS | |
| Sb#64 | Nb | SARS-CoV2 | | | | S; RBD | Phage Display | 1069 | QVQLVESGGGSVQAGGSLRLSCAASGEI | |
| | | | | | | | Library (Nanobody, | | ESIFYLGWFRQAPGKEREGVAALYTYVG | |
| | | | | | | | non-immune) | | QTYYADSVKGRFTVSLDNAKNTVYLQM | |
| | | | | | | | | | NSLKPEDTALYYCAAASYGAAHPLSIMR | |
| | | | | | | | | | YYYWGQGTQVTVS | |
| Sb#65 | Nb | SARS-CoV2 | | | | S; RBD | Phage Display | 1070 | QVQLVESGGGSVQAGGSLRLSCAASGTI | |
| | | | | | | | Library (Nanobody, | | AHIKYLGWFRQAPGKEREGVAALMTK | |
| | | | | | | | non-immune) | | WGQTYYADSVKGRFTVSLDNAKNTVYL | |
| | | | | | | | | | QMNSLKPEDTALYYCAAASYGANFPLKA | |
| | | | | | | | | | SDYSYWGQGTQVTVS | |
| Sb#66 | Nb | SARS-CoV2 | | | | S; RBD | Phage Display | 1071 | QVQLVESGGGSVQAGGSLRLSCAASGSI | |
| | | | | | | | Library (Nanobody, | | QAITYLGWFRQAPGKEREGVAALVTW | |
| | | | | | | | non-immune) | | NGQTYYADSVKGRFTVSLDNAKNTVYL | |
| | | | | | | | | | QMNSLKPEDTALYYCAAADWGYDWPL | |
| | | | | | | | | | WDEWYWYWGQGTQVTVS | |
| Sb#67 | Nb | SARS-CoV2 | | | | S; RBD | Phage Display | 1072 | QVQLVESGGGSVQAGGSLRLSCAASGSI | |
| | | | | | | | Library (Nanobody, | | SSITYLGWFRQAPGKEREGVAALVTYSG | |
| | | | | | | | non-immune) | | NTYYADSVKGRFTVSLDNAKNTVYLQM | |
| | | | | | | | | | NSLKPEDTALYYCAAATWGHSWPLYND | |
| | | | | | | | | | EYWYWGQGSQVTVS | |
| Sb#68 | Nb | SARS-CoV2 | | | | S; RBD | Phage Display | 1073 | QVQLVESGGGSVQAGGSLRLSCAASGSI | |
| | | | | | | | Library (Nanobody, | | SSITYLGWFRQAPGKEREGVAALITVNG | |
| | | | | | | | non-immune) | | HTYYADSVKGRFTVSLDNAKNTVYLQM | |
| | | | | | | | | | NSLKPEDTALYYCAAAAWGYAWPLHQ | |
| | | | | | | | | | DDYWYWGQGTQVTVS | |
| Sb#69 | Nb | SARS-CoV2 | | | | S; RBD | Phage Display | 1074 | QVQLVESGGGSVQAGGSLRLSCAASGSI | |
| | | | | | | | Library (Nanobody, | | SSITYLGWFRQAPGKEREGVAALNTFNG | |
| | | | | | | | non-immune) | | TTYYADSVKGRFTVSLDNAKNTVYLQM | |
| | | | | | | | | | NSLKPEDTALYYCAAATWGYSWPLIAEY | |
| | | | | | | | | | NWYWGQGTQVTVS | |
| Sb#7 | Nb | SARS-CoV2 | | | | S; RBD | Phage Display | 1075 | QVQLVESGGGLVQAGGSLRLSCAASGF | |
| | | | | | | | Library (Nanobody, | | PVLFTYMHWYRQAPGKEREWVAAIWS | |
| | | | | | | | non-immune) | | SGNSTWYADSVKGRFTISRDNAKNTVYL | |
| | | | | | | | | | QMNSLKPEDTAVYYCFVKVGNWYAGQ | |
| | | | | | | | | | GTQVTVS | |
| Sb#71 | Nb | SARS-CoV2 | | | | S; RBD | Phage Display | 1076 | QVQLVESGGGSVQAGGSLRLSCAASGSI | |
| | | | | | | | Library (Nanobody, | | SSITYLGWFRQAPGKEREGVAALKTQAG | |
| | | | | | | | non-immune) | | FTYYADSVKGRFTVSLDNAKNTVYLQM | |
| | | | | | | | | | NSLKPEDTALYYCAAANWGYSWPLYEA | |
| | | | | | | | | | DDWYWGQGTQVTVS | |
| Sb#8 | Nb | SARS-CoV2 | | | | S; RBD | Phage Display | 1077 | QVQLVESGGGLVQAGGSLRLSCAASGF | |
| | | | | | | | Library (Nanobody, | | PVNAGNMHWYRQAPGKEREWVAAIQ | |
| | | | | | | | non-immune) | | SYGRTTYYADSVKGRFTISRDNAKNTVYL | |
| | | | | | | | | | QMNSLKPEDTAVYYCRVFVGMHYFGQ | |
| | | | | | | | | | GTQVTVS | |

| | | | | | | SEQ | | SEQ | | |
|---|---|---|---|---|---|---|---|---|---|---|
| | | Heavy V | Heavy J | Light V | Light J | ID | | ID | | |
| Name | VL | Gene | Gene | Gene | Gene | NO.: | CDRH3 | NO.: | CDRL3 | Sources |
| Sb#59 | N/A | IGHV3-3 | IGHJ4 | N/A | N/A | 3185 | AAAAWGNSA | | N/A | Justin Walter et al., |
| | | (Alpaca) | (Alpaca) | | | | PLTTYRYYY | | | 2020 |
| | | | | | | | | | | (https://www.biorxiv.or |
| | | | | | | | | | | g/content/10.1101/202 |
| | | | | | | | | | | 0.04.16.045419v2) |
| Sb#6 | N/A | IGHV3-3 | IGHJ4 | N/A | N/A | 3186 | YVYVGAQY | | N/A | Justin Walter et al., |
| | | (Alpaca) | (Alpaca) | | | | | | | 2020 |
| | | | | | | | | | | (https://www.biorxiv.or |
| | | | | | | | | | | g/content/10.1101/202 |
| | | | | | | | | | | 0.04.16.045419v2) |
| Sb#61 | N/A | IGHV3-3 | IGHJ4 | N/A | N/A | 3187 | AAADWGYD | | N/A | Justin Walter et al., |
| | | (Alpaca) | (Alpaca) | | | | WPLWDEWY | | | 2020 |
| | | | | | | | WY | | | (https://www.biorxiv.or |
| | | | | | | | | | | g/content/10.1101/202 |
| | | | | | | | | | | 0.04.16.045419v2) |
| Sb#62 | N/A | IGHV3-3 | IGHJ4 | N/A | N/A | 3188 | AAANYGANY | | N/A | Justin Walter et al., |
| | | (Alpaca) | (Alpaca) | | | | PLYSQQYSY | | | 2020 |
| | | | | | | | | | | (https://www.biorxiv.or |
| | | | | | | | | | | g/content/10.1101/202 |
| | | | | | | | | | | 0.04.16.045419v2) |
| Sb#63 | N/A | IGHV3-3 | IGHJ4 | N/A | N/A | 3189 | AAANYGANE | | N/A | Justin Walter et al., |
| | | (Alpaca) | (Alpaca) | | | | PLQYTHYNY | | | 2020 |
| | | | | | | | | | | (https://www.biorxiv.or |
| | | | | | | | | | | g/content/10.1101/202 |
| | | | | | | | | | | 0.04.16.045419v2) |
| Sb#64 | N/A | IGHV3-3 | IGHJ4 | N/A | N/A | 3190 | AAASYGAAHP | | N/A | Justin Walter et al., |
| | | (Alpaca) | (Alpaca) | | | | LSIMRYYY | | | 2020 |
| | | | | | | | | | | (https://www.biorxiv.or |
| | | | | | | | | | | g/content/10.1101/202 |
| | | | | | | | | | | 0.04.16.045419v2) |
| Sb#65 | N/A | IGHV3-3 | IGHJ4 | N/A | N/A | 3191 | AAASYGANFP | | N/A | Justin Walter et al., |
| | | (Alpaca) | (Alpaca) | | | | LKASDYSY | | | 2020 |
| | | | | | | | | | | (https://www.biorxiv.or |
| | | | | | | | | | | g/content/10.1101/202 |
| | | | | | | | | | | 0.04.16.045419v2) |
| Sb#66 | N/A | IGHV3-3 | IGHJ4 | N/A | N/A | 3192 | AAADWGYD | | N/A | Justin Walter et al., |
| | | (Alpaca) | (Alpaca) | | | | WPLWDEWY | | | 2020 |
| | | | | | | | WY | | | (https://www.biorxiv.or |
| | | | | | | | | | | g/content/10.1101/202 |
| | | | | | | | | | | 0.04.16.045419v2) |
| Sb#67 | N/A | IGHV3-3 | IGHJ4 | N/A | N/A | 3193 | AAATWGHS | | N/A | Justin Walter et al., |
| | | (Alpaca) | (Alpaca) | | | | WPLYNDEYW | | | 2020 |
| | | | | | | | Y | | | (https://www.biorxiv.or |
| | | | | | | | | | | g/content/10.1101/202 |
| | | | | | | | | | | 0.04.16.045419v2) |
| Sb#68 | N/A | IGHV3-3 | IGHJ4 | N/A | N/A | 3194 | AAAAWGYA | | N/A | Justin Walter et al., |
| | | (Alpaca) | (Alpaca) | | | | WPLHQDDY | | | 2020 |
| | | | | | | | WY | | | (https://www.biorxiv.or |
| | | | | | | | | | | g/content/10.1101/202 |
| | | | | | | | | | | 0.04.16.045419v2) |
| Sb#69 | N/A | IGHV3-3 | IGHJ5 | N/A | N/A | 3195 | AAATWGYSW | | N/A | Justin Walter et al., |
| | | (Alpaca) | (Alpaca) | | | | PLIAEYNWY | | | 2020 |
| | | | | | | | | | | (https://www.biorxiv.or |
| | | | | | | | | | | g/content/10.1101/202 |
| | | | | | | | | | | 0.04.16.045419v2) |
| Sb#7 | N/A | IGHV3-3 | IGHJ4 | N/A | N/A | 3196 | FVKVGNWY | | N/A | Justin Walter et al., |
| | | (Alpaca) | (Alpaca) | | | | | | | 2020 |
| | | | | | | | | | | (https://www.biorxiv.or |
| | | | | | | | | | | g/content/10.1101/202 |
| | | | | | | | | | | 0.04.16.045419v2) |
| Sb#71 | N/A | IGHV3-3 | IGHJ4 | N/A | N/A | 3197 | AAANWGYS | | N/A | Justin Walter et al., |
| | | (Alpaca) | (Alpaca) | | | | WPLYEADDW | | | 2020 |
| | | | | | | | Y | | | (https://www.biorxiv.or |
| | | | | | | | | | | g/content/10.1101/202 |
| | | | | | | | | | | 0.04.16.045419v2) |
| Sb#8 | N/A | IGHV3-3 | IGHJ4 | N/A | N/A | 3198 | YVYVGGSY | | N/A | Justin Walter et al., |
| | | (Alpaca) | (Alpaca) | | | | | | | 2020 |
| | | | | | | | | | | (https://www.biorxiv.or |
| | | | | | | | | | | g/content/10.1101/202 |
| | | | | | | | | | | 0.04.16.045419v2) |

| | | | | | Not | | | | | |
|---|---|---|---|---|---|---|---|---|---|---|
| | Ab | | | Neutral- | Neutral- | | | SEQ | | SEQ |
| | or | | Doesn't | ising | ising | Protein + | | ID | | ID |
| Name | Nb | Binds to | Bind to | Vs | Vs | Epitope | Origin | NO.: | VH or VHH | NO.: |
| Sb#9 | Nb | SARS-CoV2 | | | | S; RBD | Phage Display | 1078 | QVQLVESGGGLVQAGGSLRLSCAASGF | |
| | | | | | | | Library (Nanobody, | | PVSSSTMTWYRQAPGKEREWVAAINSY | |
| | | | | | | | non-immune) | | GWETHYADSVKGRFTISRDNAKNTVYL | |
| | | | | | | | | | QMNSLKPEDTAVYYCYVYVGGSYIGQG | |
| | | | | | | | | | TQVTVS | |
| Sb100 | Nb | SARS-CoV2 | | SARS-CoV2 | | S; RBD | Phage Display | 1079 | QVQLVESGGGSVQAGGSLRLSCAASGSI | |
| | | | | | | | Library (Nanobody, | | SSITYLGWFRQAPGKEREGVAALVTSDG | |
| | | | | | | | non-immune) | | RTYYADSVKGRFTVSLDNAKNTVYLQM | |
| | | | | | | | | | NSLKPEDTALYYCAAANWGYSWPLYQT | |
| | | | | | | | | | EYWYWGQGTQVTVSS | |
| Sb12 | Nb | SARS-CoV2 | | SARS-CoV2 | | S; RBD | Phage Display | 1080 | QVQLVESGGGLVQAGGSLRLSCAASGF | |
| | | | | | | | Library (Nanobody, | | PVQLYWMEWYRQAPGKEREWVAAITS | |
| | | | | | | | non-immune) | | DGDYTEYADSVKGRFTISRDNAKNTVYL | |
| | | | | | | | | | QMNSLKPEDTAVYYCYVKVGEWYYGQ | |
| | | | | | | | | | GTQVTVSS | |
| Sb13 | Nb | SARS-CoV2 | | | | S; RBD | Phage Display | 1081 | QVQLVESGGGLVQAGGSLRLSCAASGF | |
| | | (weak) | | | | | Library (Nanobody, | | PVENYYMRWYRQAPGKEREWVAAIES | |
| | | | | | | | non-immune) | | SGAETRYADSVKGRFTISRDNAKNTVYL | |
| | | | | | | | | | QMNSLKPEDTAVYYCYVVVGWGYAGQ | |
| | | | | | | | | | GTQVTVSS | |
| Sb15 | Nb | SARS-CoV2 | | | | S; RBD | Phage Display | 1082 | QVQLVESGGGLVQAGGSLRLSCAASGF | |
| | | | | | | | Library (Nanobody, | | PVYEHYMRWYRQAPGKEREWVAAIQS | |
| | | | | | | | non-immune) | | HGNHTAYADSVKGRFTISRDNAKNTVYL | |
| | | | | | | | | | QMNSLKPEDTAVYYCFVVVGNGYTGQ | |
| | | | | | | | | | GTQVTVSS | |
| Sb16 | Nb | SARS-CoV2 | | | | S; RBD | Phage Display | 1083 | QVQLVESGGGLVRAGGSLRLSCAASGF | |
| | | | | | | | Library (Nanobody, | | PVASQEMTWYRQAPGKEREWVAAISSS | |
| | | | | | | | non-immune) | | GRQTEYADSVKGRFTISRDNAKNTVYLQ | |
| | | | | | | | | | MNSLKPEDTAVYYCYVYVGGSYIGQGT | |
| | | | | | | | | | QVTVSS | |
| Sb17 | Nb | SARS-CoV2 | | SARS-CoV2 | | S; RBD | Phage Display | 1084 | QVQLVESGGGLVQAGGSLRLSCAASGF | |
| | | | | | | | Library (Nanobody, | | PVKASEMEWYRQAPGKEREWVAAIASI | |
| | | | | | | | non-immune) | | GYNTYYADSVKGRFTISRDNAKNTVYLQ | |
| | | | | | | | | | MNSLKPEDTAVYYCLVYVGATYIGQGTQ | |
| | | | | | | | | | VTVSS | |
| Sb2 | Nb | SARS-CoV2 | | | | S; RBD | Phage Display | 1085 | QVQLVESGGGLVQAGGSLRLSCAASGF | |
| | | | | | | | Library (Nanobody, | | PVSNEEMTWYRQAPGKEREWVAAIAS | |
| | | | | | | | non-immune) | | NGNQTEYADSVKGRFTISRDNAKNTVYL | |
| | | | | | | | | | QMNSLKPEDTAVYYCYVYVGASYIGQG | |
| | | | | | | | | | TQVTVSS | |
| Sb21 | Nb | SARS-CoV2 | | | | S; RBD | Phage Display | 1086 | QVQLVESGGGLVQAGGSLRLSCAASGF | |
| | | | | | | | Library (Nanobody, | | PVKESEMTWYRQARGKEREWVAAINS | |
| | | | | | | | non-immune) | | HGMTTHYADSVKGRFTISRDNAKNTVY | |
| | | | | | | | | | LQMNSLKPEDTAVYYCYVYVGGSYIGQ | |
| | | | | | | | | | GTQVTVSS | |
| Sb22 | Nb | SARS-CoV2 | | SARS-CoV2 | | S; RBD | Phage Display | 1087 | QVQLVESGGGLVQAGGSLRLSCAASGF | |
| | | | | | | | Library (Nanobody, | | PVNHYEMEWYRQAPGREREWVAAIM | |
| | | | | | | | non-immune) | | DSTGYETAYADSVKGRFTISRDNAKNTV | |
| | | | | | | | | | YLQMNSLKPEDTAVYYCYVYVGASYIGQ | |
| | | | | | | | | | GTQVTVSS | |
| Sb23 | Nb | SARS-CoV2 | | SARS-CoV2 | | S; RBD | Phage Display | 1088 | QVQLVESGGGLVQAGGSLRLSCAASGF | |
| | | | | | | | Library (Nanobody, | | PVESENMHWYRQAPGKEREWVAAIYS | |
| | | | | | | | non-immune) | | TGGWTLYADSVKGRFTISRDNAKNTVYL | |
| | | | | | | | | | QMNSLKPEDTAVYYCAVQVGYWYEGQ | |
| | | | | | | | | | GTQVTVSS | |
| Sb25 | Nb | SARS-CoV2 | | | | S; RBD | Phage Display | 1089 | QVQLVESGGGLVQAGGSLRLSCAASGF | |
| | | | | | | | Library (Nanobody, | | PVESTEMTWYRQAPGKEREWVAAIESE | |
| | | | | | | | non-immune) | | GHGTEYADSVKGRFTISRDNAKNTVYLQ | |
| | | | | | | | | | MNSLKPEDTAVYYCYVYVGAGYIGQGT | |
| | | | | | | | | | QVTVSS | |
| Sb27 | Nb | SARS-CoV2 | | | | S; RBD | Phage Display | 1090 | QVQLVESGGGLVQAGGSLRLSCAASGF | |
| | | | | | | | Library (Nanobody, | | PVKASEMVWYRQAPGKEREWVAAILS | |
| | | | | | | | non-immune) | | QGHATEYADSVKGRFTISRDNAKNTVYL | |
| | | | | | | | | | QMNSLKPEDTAVYYCYVWVGRSYIGQG | |
| | | | | | | | | | TQVTVSS | |

| | | | | | | SEQ | | SEQ | | |
|---|---|---|---|---|---|---|---|---|---|---|
| | | Heavy V | Heavy J | Light V | Light J | ID | | ID | | |
| Name | VL | Gene | Gene | Gene | Gene | NO.: | CDRH3 | NO.: | CDRL3 | Sources |
| Sb#9 | N/A | IGHV3-3 | IGHJ4 | N/A | N/A | 3199 | RVFVGMHY | | N/A | Justin Walter et al., |
| | | (Alpaca) | (Alpaca) | | | | | | | 2020 |
| | | | | | | | | | | (https://www.biorxiv.or |
| | | | | | | | | | | g/content/10.1101/202 |
| | | | | | | | | | | 0.04.16.045419v2) |
| Sb100 | N/A | IGHV3-3 | IGHJ4 | N/A | N/A | 3200 | AAANWGYS | | N/A | Tania Custodia et al., |
| | | (Alpaca) | (Alpaca) | | | | WPLYQTEYW | | | 2020 |
| | | | | | | | Y | | | (https://www.biorxiv.or |
| | | | | | | | | | | g/content/10.1101/202 |
| | | | | | | | | | | 0.06.23.165415v1.full.p |
| | | | | | | | | | | df+html) |
| Sb12 | N/A | IGHV3-3 | IGHJ4 | N/A | N/A | 3201 | YVKVGEWY | | N/A | Tania Custodia et al., |
| | | (Alpaca) | (Alpaca) | | | | | | | 2020 |
| | | | | | | | | | | (https://www.biorxiv.or |
| | | | | | | | | | | g/content/10.1101/202 |
| | | | | | | | | | | 0.06.23.165415v1.full.p |
| | | | | | | | | | | df+html) |
| Sb13 | N/A | IGHV3-3 | IGHJ4 | N/A | N/A | 3202 | YVVVGWGY | | N/A | Tania Custodia et al., |
| | | (Alpaca) | (Alpaca) | | | | | | | 2020 |
| | | | | | | | | | | (https://www.biorxiv.or |
| | | | | | | | | | | g/content/10.1101/202 |
| | | | | | | | | | | 0.06.23.165415v1.full.p |
| | | | | | | | | | | df+html) |
| Sb15 | N/A | IGHV3-3 | IGHJ4 | N/A | N/A | 3203 | FVVVGNGY | | N/A | Tania Custodia et al., |
| | | (Alpaca) | (Alpaca) | | | | | | | 2020 |
| | | | | | | | | | | (https://www.biorxiv.or |
| | | | | | | | | | | g/content/10.1101/202 |
| | | | | | | | | | | 0.06.23.165415v1.full.p |
| | | | | | | | | | | df+html) |
| Sb16 | N/A | IGHV3-3 | IGHJ4 | N/A | N/A | 3204 | YVYVGGSY | | N/A | Tania Custodia et al., |
| | | (Alpaca) | (Alpaca) | | | | | | | 2020 |
| | | | | | | | | | | (https://www.biorxiv.or |
| | | | | | | | | | | g/content/10.1101/202 |
| | | | | | | | | | | 0.06.23.165415v1.full.p |
| | | | | | | | | | | df+html) |
| Sb17 | N/A | IGHV3-3 | IGHJ4 | N/A | N/A | 3205 | LVYVGATY | | N/A | Tania Custodia et al., |
| | | (Alpaca) | (Alpaca) | | | | | | | 2020 |
| | | | | | | | | | | (https://www.biorxiv.or |
| | | | | | | | | | | g/content/10.1101/202 |
| | | | | | | | | | | 0.06.23.165415v1.full.p |
| | | | | | | | | | | df+html) |
| Sb2 | N/A | IGHV3-3 | IGHJ4 | N/A | N/A | 3206 | YVYVGASY | | N/A | Tania Custodia et al., |
| | | (Alpaca) | (Alpaca) | | | | | | | 2020 |
| | | | | | | | | | | (https://www.biorxiv.or |
| | | | | | | | | | | g/content/10.1101/202 |
| | | | | | | | | | | 0.06.23.165415v1.full.p |
| | | | | | | | | | | df+html) |
| Sb21 | N/A | IGHV3-3 | IGHJ4 | N/A | N/A | 3207 | YVYVGGSY | | N/A | Tania Custodia et al., |
| | | (Alpaca) | (Alpaca) | | | | | | | 2020 |
| | | | | | | | | | | (https://www.biorxiv.or |
| | | | | | | | | | | g/content/10.1101/202 |
| | | | | | | | | | | 0.06.23.165415v1.full.p |
| | | | | | | | | | | df+html) |
| Sb22 | N/A | IGHV3-3 | IGHJ4 | N/A | N/A | 3208 | YVYVGASY | | N/A | Tania Custodia et al., |
| | | (Alpaca) | (Alpaca) | | | | | | | 2020 |
| | | | | | | | | | | (https://www.biorxiv.or |
| | | | | | | | | | | g/content/10.1101/202 |
| | | | | | | | | | | 0.06.23.165415v1.full.p |
| | | | | | | | | | | df+html) |
| Sb23 | N/A | IGHV3-3 | IGHJ4 | N/A | N/A | 3209 | AVQVGYWY | | N/A | Tania Custodia et al., |
| | | (Alpaca) | (Alpaca) | | | | | | | 2020 |
| | | | | | | | | | | (https://www.biorxiv.or |
| | | | | | | | | | | g/content/10.1101/202 |
| | | | | | | | | | | 0.06.23.165415v1.full.p |
| | | | | | | | | | | df+html) |
| Sb25 | N/A | IGHV3-3 | IGHJ4 | N/A | N/A | 3210 | YVYVGAGY | | N/A | Tania Custodia et al., |
| | | (Alpaca) | (Alpaca) | | | | | | | 2020 |
| | | | | | | | | | | (https://www.biorxiv.or |
| | | | | | | | | | | g/content/10.1101/202 |
| | | | | | | | | | | 0.06.23.165415v1.full.p |
| | | | | | | | | | | df+html) |
| Sb27 | N/A | IGHV3-3 | IGHJ4 | N/A | N/A | 3211 | YVWVGRSY | | N/A | Tania Custodia et al., |
| | | (Alpaca) | (Alpaca) | | | | | | | 2020 |
| | | | | | | | | | | (https://www.biorxiv.or |
| | | | | | | | | | | g/content/10.1101/202 |
| | | | | | | | | | | 0.06.23.165415v1.full.p |
| | | | | | | | | | | df+html) |

| | | | | | Not | | | | | |
|---|---|---|---|---|---|---|---|---|---|---|
| | Ab | | | Neutral- | Neutral- | | | SEQ | | SEQ |
| | or | | Doesn't | ising | ising | Protein + | | ID | | ID |
| Name | Nb | Binds to | Bind to | Vs | Vs | Epitope | Origin | NO.: | VH or VHH | NO.: |
| Sb28 | Nb | SARS-CoV2 | | | | S; RBD | Phage Display | 1091 | QVQLVESGGGLVQAGGSLRLSCAASGF | |
| | | | | | | | Library (Nanobody, | | PVYSAEMEWYRQAPGKEREWVAAISSY | |
| | | | | | | | non-immune) | | GTNTYYADSVKGRFTISRDNAKNTVYLQ | |
| | | | | | | | | | MNSLKPEDTAVYYCYVYVGSSYIGQGTQ | |
| | | | | | | | | | VTVSS | |
| Sb30 | Nb | SARS-CoV2 | | | | S; RBD | Phage Display | 1092 | QVQLVESGGGLVQAGGSLRLSCAASGF | |
| | | | | | | | Library (Nanobody, | | PVWYKEMEWYRQAPGKEREWVAAITS | |
| | | | | | | | non-immune) | | AGHHTYYADSVKGRFTISRDNAKNTVYL | |
| | | | | | | | | | QMNSLKPEDTAVYYCYVYVGESYIGQGT | |
| | | | | | | | | | QVTVSS | |
| Sb32 | Nb | SARS-CoV2 | | | | S; RBD | Phage Display | 1093 | QVQLVESGGGLVQAGGSLRLSCAASGF | |
| | | | | | | | Library (Nanobody, | | PVAHKSMWWYRQAPGKEREWVAAIES | |
| | | | | | | | non-immune) | | TGDTTRYADSVKGRFTISRDNAKNTVYL | |
| | | | | | | | | | QMNSLKPEDTAVYYCVVWVGEVYRGQ | |
| | | | | | | | | | GTQVTVSS | |
| Sb37 | Nb | SARS-CoV2 | | | | S; RBD | Phage Display | 1094 | QVQLVESGGGLVQAGGSLRLSCAASGF | |
| | | (weak) | | | | | Library (Nanobody, | | PVYNTWMEWYRQAPGKEREWVAAITS | |
| | | | | | | | non-immune) | | YGFHTYYADSVKGRFTISRDNAKNTVYL | |
| | | | | | | | | | QMNSLKPEDTAVYYCNVKDEGNTTAYY | |
| | | | | | | | | | DYWGQGTQVTVSS | |
| Sb38 | Nb | SARS-CoV2 | | | | S; RBD | Phage Display | 1095 | QVQLVESGGGLVQAGGSLRLSCAASGF | |
| | | | | | | | Library (Nanobody, | | PVYWAHMTWYRQAPGKEREWVAAIV | |
| | | | | | | | non-immune) | | SSGAYTAYADSVKGRFTISRDNAKNTVYL | |
| | | | | | | | | | QMNSLKPEDTAVYYCNVKDFGTQEHYY | |
| | | | | | | | | | DYWGQGTQVTVSS | |
| Sb39 | Nb | SARS-CoV2 | | | | S; RBD | Phage Display | 1096 | QVQLVESGGGPVQAGGSLRLSCAASGF | |
| | | | | | | | Library (Nanobody, | | PVMWSHMHWYRQAPGKEREWVAAIV | |
| | | | | | | | non-immune) | | SYGAYTIYADSVKGRFTISRDNAKNTVYL | |
| | | | | | | | | | QMNSLKPEDTAVYYCNVKDFGGYRYYY | |
| | | | | | | | | | DYWGQGTQVTVSS | |
| Sb40 | Nb | SARS-CoV2 | | | | S; RBD | Phage Display | 1097 | QVQLVESGGGLVQAGGSLRLSCAASGF | |
| | | | | | | | Library (Nanobody, | | PVQGTWMEWYRQAPGKEREWVAAIT | |
| | | | | | | | non-immune) | | SVGYRTYYADSVKGRFTISRDNAKNTVYL | |
| | | | | | | | | | QMNSLKPEDTAVYYCNVKDEGAIAKNY | |
| | | | | | | | | | DYWGQGTQVTVSS | |
| Sb42 | Nb | SARS-CoV2 | | SARS-CoV2 | | S; RBD | Phage Display | 1098 | QVQLVESGGGLVQAGGSLRLSCAASGF | |
| | | | | | | | Library (Nanobody, | | PVYNTWMEWYRQAPGKEREWVAAITS | |
| | | | | | | | non-immune) | | WGFKTYYADSVKGRFTISRDNAKNTVYL | |
| | | | | | | | | | QMNSLKPEDTAVYYCNVKDEGYTGYYY | |
| | | | | | | | | | DYWGQGTQVTVSS | |
| Sb43 | Nb | SARS-CoV2 | | SARS-CoV2 | | S; RBD | Phage Display | 1099 | QVQLVESGGGLVQAGGSLRLSCAASGF | |
| | | | | | | | Library (Nanobody, | | PVEWTHMHWYRQAPGKEREWVAAIA | |
| | | | | | | | non-immune) | | SSGAYTVYADSVKGRFTISRDNAKNTVYL | |
| | | | | | | | | | QMNSLKPEDTAVYYCNVKDWGSQDRY | |
| | | | | | | | | | YDYWGQGTQVTVSS | |
| Sb45 | Nb | SARS-CoV2 | | | | S; RBD | Phage Display | 1100 | QVQLVESGGGLVQAGGSLRLSCAASGF | |
| | | | | | | | Library (Nanobody, | | PVAGTWMEWYRQAPGKEREWVAAITS | |
| | | | | | | | non-immune) | | YGYRTYYADSVKGRFTISRDNAKNTVYL | |
| | | | | | | | | | QMNSLKPEDTAVYYCNVKDEGKSSQVY | |
| | | | | | | | | | DYWGQGTQVTVSS | |
| Sb46 | Nb | SARS-CoV2 | | SARS-CoV2 | | S; RBD | Phage Display | 1101 | QVQLVESGGGLVQAGGSLRLSCAASGF | |
| | | | | | | | Library (Nanobody, | | PVNYTIMFWYRKAPGKEREWVAAIKSH | |
| | | | | | | | non-immune) | | GATTLYADSVKGRFTISRDNAKNTVYLQ | |
| | | | | | | | | | MNSLKPEDTAVYYCNVKDVGNDQKSYD | |
| | | | | | | | | | YWGQGTQVTVSS | |
| Sb47 | Nb | SARS-CoV2 | | | | S; RBD | Phage Display | 1102 | QVQLVESGGGLVQAGGSLRLSCAASGF | |
| | | | | | | | Library (Nanobody, | | PVVWAHMHWYRQAPGKEREWVAAIT | |
| | | | | | | | non-immune) | | SEGAHTIYADSVKGRFTISRDNAKNTVYL | |
| | | | | | | | | | QMNSLKPEDTAVYYCNVKDWGTYSTYY | |
| | | | | | | | | | DYWGQGTQVTVSS | |

| | | | | | | SEQ | | SEQ | | |
|---|---|---|---|---|---|---|---|---|---|---|
| | | Heavy V | Heavy J | Light V | Light J | ID | | ID | | |
| Name | VL | Gene | Gene | Gene | Gene | NO.: | CDRH3 | NO.: | CDRL3 | Sources |
| Sb28 | N/A | IGHV3-3 | IGHJ4 | N/A | N/A | 3212 | YVYVGSSY | | N/A | Tania Custodia et al., |
| | | (Alpaca) | (Alpaca) | | | | | | | 2020 |
| | | | | | | | | | | (https://www.biorxiv.or |
| | | | | | | | | | | g/content/10.1101/202 |
| | | | | | | | | | | 0.06.23.165415v1.full.p |
| | | | | | | | | | | df+html) |
| Sb30 | N/A | IGHV3-3 | IGHJ4 | N/A | N/A | 3213 | YVYVGESY | | N/A | Tania Custodia et al., |
| | | (Alpaca) | (Alpaca) | | | | | | | 2020 |
| | | | | | | | | | | (https://www.biorxiv.or |
| | | | | | | | | | | g/content/10.1101/202 |
| | | | | | | | | | | 0.06.23.165415v1.full.p |
| | | | | | | | | | | df+html) |
| Sb32 | N/A | IGHV3-3 | IGHJ4 | N/A | N/A | 3214 | VVWVGEVY | | N/A | Tania Custodia et al., |
| | | (Alpaca) | (Alpaca) | | | | | | | 2020 |
| | | | | | | | | | | (https://www.biorxiv.or |
| | | | | | | | | | | g/content/10.1101/202 |
| | | | | | | | | | | 0.06.23.165415v1.full.p |
| | | | | | | | | | | df+html) |
| Sb37 | N/A | IGHV3S5 | IGHJ4 | N/A | N/A | 3215 | NVKDEGNTT | | N/A | Tania Custodia et al., |
| | | 3 | (Alpaca) | | | | AYYDY | | | 2020 |
| | | (Alpaca) | | | | | | | | (https://www.biorxiv.or |
| | | | | | | | | | | g/content/10.1101/202 |
| | | | | | | | | | | 0.06.23.165415v1.full.p |
| | | | | | | | | | | df+html) |
| Sb38 | N/A | IGHV3S5 | IGHJ4 | N/A | N/A | 3216 | NVKDFGTQE | | N/A | Tania Custodia et al., |
| | | 3 | (Alpaca) | | | | HYYDY | | | 2020 |
| | | (Alpaca) | | | | | | | | (https://www.biorxiv.or |
| | | | | | | | | | | g/content/10.1101/202 |
| | | | | | | | | | | 0.06.23.165415v1.full.p |
| | | | | | | | | | | df+html) |
| Sb39 | N/A | IGHV3S5 | IGHJ4 | N/A | N/A | 3217 | NVKDFGGYR | | N/A | Tania Custodia et al., |
| | | 3 | (Alpaca) | | | | YYYDY | | | 2020 |
| | | (Alpaca) | | | | | | | | (https://www.biorxiv.or |
| | | | | | | | | | | g/content/10.1101/202 |
| | | | | | | | | | | 0.06.23.165415v1.full.p |
| | | | | | | | | | | df+html) |
| Sb40 | N/A | IGHV3S5 | IGHJ4 | N/A | N/A | 3218 | NVKDEGAIAK | | N/A | Tania Custodia et al., |
| | | 3 | (Alpaca) | | | | NYDY | | | 2020 |
| | | (Alpaca) | | | | | | | | (https://www.biorxiv.or |
| | | | | | | | | | | g/content/10.1101/202 |
| | | | | | | | | | | 0.06.23.165415v1.full.p |
| | | | | | | | | | | df+html) |
| Sb42 | N/A | IGHV3S5 | IGHJ4 | N/A | N/A | 3219 | NVKDEGYTGY | | N/A | Tania Custodia et al., |
| | | 3 | (Alpaca) | | | | YYDY | | | 2020 |
| | | (Alpaca) | | | | | | | | (https://www.biorxiv.or |
| | | | | | | | | | | g/content/10.1101/202 |
| | | | | | | | | | | 0.06.23.165415v1.full.p |
| | | | | | | | | | | df+html) |
| Sb43 | N/A | IGHV3-3 | IGHJ4 | N/A | N/A | 3220 | NVKDWGSQ | | N/A | Tania Custodia et al., |
| | | (Alpaca) | (Alpaca) | | | | DRYYDY | | | 2020 |
| | | | | | | | | | | (https://www.biorxiv.or |
| | | | | | | | | | | g/content/10.1101/202 |
| | | | | | | | | | | 0.06.23.165415v1.full.p |
| | | | | | | | | | | df+html) |
| Sb45 | N/A | IGHV3S5 | IGHJ4 | N/A | N/A | 3221 | NVKDEGKSS | | N/A | Tania Custodia et al., |
| | | 3 | (Alpaca) | | | | QVYDY | | | 2020 |
| | | (Alpaca) | | | | | | | | (https://www.biorxiv.or |
| | | | | | | | | | | g/content/10.1101/202 |
| | | | | | | | | | | 0.06.23.165415v1.full.p |
| | | | | | | | | | | df+html) |
| Sb46 | N/A | IGHV3S5 | IGHJ4 | N/A | N/A | 3222 | NVKDVGNDQ | | N/A | Tania Custodia et al., |
| | | 3 | (Alpaca) | | | | KSYDY | | | 2020 |
| | | (Alpaca) | | | | | | | | (https://www.biorxiv.or |
| | | | | | | | | | | g/content/10.1101/202 |
| | | | | | | | | | | 0.06.23.165415v1.full.p |
| | | | | | | | | | | df+html) |
| Sb47 | N/A | IGHV3S5 | IGHJ4 | N/A | N/A | 3223 | NVKDWGTYS | | N/A | Tania Custodia et al., |
| | | 3 | (Alpaca) | | | | TYYDY | | | 2020 |
| | | (Alpaca) | | | | | | | | (https://www.biorxiv.or |
| | | | | | | | | | | g/content/10.1101/202 |
| | | | | | | | | | | 0.06.23.165415v1.full.p |
| | | | | | | | | | | df+html) |

| | | | | | Not | | | | | |
|---|---|---|---|---|---|---|---|---|---|---|
| | Ab | | | Neutral- | Neutral- | | | SEQ | | SEQ |
| | or | | Doesn't | ising | ising | Protein + | | ID | | ID |
| Name | Nb | Binds to | Bind to | Vs | Vs | Epitope | Origin | NO.: | VH or VHH | NO.: |
| Sb5 | Nb | SARS-CoV2 | | | | S; RBD | Phage Display | 1103 | QVQLVESGGGLVQAGGSLRLSCAASGF | |
| | | (weak) | | | | | Library (Nanobody, | | PVAQQEMTWYRQAPGKEREWVAAISS | |
| | | | | | | | non-immune) | | IGSITHYADSVKGRFTISRDNAKNTVYLQ | |
| | | | | | | | | | MNSLKPEDTAVYYCYVYVGASYIGQGT | |
| | | | | | | | | | QVTVSS | |
| Sb50 | Nb | SARS-CoV2 | | | | S; RBD | Phage Display | 1104 | QVQLVESGGGLVQAGGSLRLSCAASGF | |
| | | | | | | | Library (Nanobody, | | PVQYEHMHWYRQAPGKEREWVAAIVS | |
| | | | | | | | non-immune) | | EGAYTHYADSVKGRFTISRDNAKNTVYL | |
| | | | | | | | | | QMNSLKPEDTAVYYCNVKDWGWLAQY | |
| | | | | | | | | | YDYWGQGTQVTVSS | |
| Sb52 | Nb | SARS-CoV2 | | | | S; RBD | Phage Display | 1105 | QVQLVESGGGLVQAGGSLRLSCAASGF | |
| | | | | | | | Library (Nanobody, | | PVNYNWMEWYRQAPGKEREWVAAIT | |
| | | | | | | | non-immune) | | SWGYKTYYADSVKGRFTISRDNAKNTVY | |
| | | | | | | | | | LQMNSLKPEDTAVYYCNVKDEGMWQ | |
| | | | | | | | | | HYYDYWGQGTQVTVSS | |
| Sb54 | Nb | SARS-CoV2 | | | | S; RBD | Phage Display | 1106 | QVQLVESGGGLVQAGGSLRLSCAASGF | |
| | | | | | | | Library (Nanobody, | | PVWNTWMEWYRQAPGKEREWVAAIT | |
| | | | | | | | non-immune) | | SYGFKTYYADSVKGRFTISRDNAKNTVYL | |
| | | | | | | | | | QMNSLKPEDTAVYYCNVKDEGNSQSHY | |
| | | | | | | | | | DYWGQGTQVTVSS | |
| Sb56 | Nb | SARS-CoV2 | | | | S; RBD | Phage Display | 1107 | QVQLVESGGGLVQAGGSLRLSCAASGF | |
| | | | | | | | Library (Nanobody, | | PVEMWSMEWYRQAPGKEREWVAAI | |
| | | | | | | | non-immune) | | MSFGYQTWYADSVKGRFTISRDNAKNT | |
| | | | | | | | | | VYLQMNSLKPEDTAVYYCNVKDAGNSK | |
| | | | | | | | | | ALYDYWGQGTQVTVSS | |
| Sb57 | Nb | SARS-CoV2 | | | | S; RBD | Phage Display | 1108 | QVQLVESGGGLVQAGGSLRLSCAASGF | |
| | | | | | | | Library (Nanobody, | | PVEHDHMHWYRQAPGKEREWVAAIVS | |
| | | | | | | | non-immune) | | QGAYTVYADSVKGRFTISRDNAKNTVYL | |
| | | | | | | | | | QMNSLKPEDTAVYYCNVKDWGRAGAR | |
| | | | | | | | | | YDYWGQGTQVTVSS | |
| Sb58 | Nb | SARS-CoV2 | | | | S; RBD | Phage Display | 1109 | QVQLVESGGGLVQAGGSLRLSCAASGF | |
| | | (weak) | | | | | Library (Nanobody, | | PVDAAWMEWYRQAPGKEREWVAAIT | |
| | | | | | | | non-immune) | | SYGYRTYYADSVKGRFTISRDNAKNTVYL | |
| | | | | | | | | | QMNSLKPEDTAVYYCNVKDMDRWRTT | |
| | | | | | | | | | YDYWGQGTQVTVSS | |
| Sb6 | Nb | SARS-CoV2 | | | | S; RBD | Phage Display | 1110 | QVQLVESGGGLVQAGGSLRLSCAASGF | |
| | | | | | | | Library (Nanobody, | | PVNHTRMYWYRQAPGKEREWVAAIQS | |
| | | | | | | | non-immune) | | HGQNTFYADSVKGRFTISRDNAKNTVYL | |
| | | | | | | | | | QMNSLKPEDTAVYYCYVWVGNQYWG | |
| | | | | | | | | | QGTQVTVSS | |
| Sb60 | Nb | SARS-CoV2 | | | | S; RBD | Phage Display | 1111 | QVQLVESGGGLVQAGGSLRLSCAASGF | |
| | | | | | | | Library (Nanobody, | | PVVAWQMTWYRQAPGKEREWVAAIR | |
| | | | | | | | non-immune) | | SFGVSTHYADSVKGRFTISRDNAKNTVYL | |
| | | | | | | | | | QMNSLKPEDTAVYYCNVKDWGYEYEG | |
| | | | | | | | | | YDYWGQGTQVTVSS | |
| Sb61 | Nb | SARS-CoV2 | | | | S; RBD | Phage Display | 1112 | QVQLVESGGGLVQAGGSLRLSCAASGF | |
| | | | | | | | Library (Nanobody, | | PVQHEWMEWYRQAPGKEREWVAAIT | |
| | | | | | | | non-immune) | | SYGYRTYYADSVKGRFTISRDNAKNTVYL | |
| | | | | | | | | | QMNSLKPEDTAVYYCNVKDTGTYQAW | |
| | | | | | | | | | YDYWGQGTQVTVSS | |
| Sb62 | Nb | SARS-CoV2 | | SARS-CoV2 | | S; RBD | Phage Display | 1113 | QVQLVESGGGLVQAGGSLRLSCAASGF | |
| | | | | | | | Library (Nanobody, | | PVEQEHMYWYRQASGKEREWVAAIVS | |
| | | | | | | | non-immune) | | EGAYTAYADSVKGRFTISRDNAKNTVYL | |
| | | | | | | | | | QMNSLKPEDTAVYYCNVKDWGGYQW | |
| | | | | | | | | | YYDYWGQGTQVTVSS | |
| Sb63 | Nb | SARS-CoV2 | | | | S; RBD | Phage Display | 1114 | QVQLVESGGGLVQAGGSLRLSCAASGF | |
| | | | | | | | Library (Nanobody, | | PVNAEIMFWYRQAPGKEREWVAAIKSA | |
| | | | | | | | non-immune) | | GTTTLYADSVKGRFTISRDNAKNTVYLQ | |
| | | | | | | | | | MNSLKPEDTAVYYCNVKDYGAQAHYYD | |
| | | | | | | | | | YWGQGTQVTVSS | |

| | | | | | | SEQ | | SEQ | | |
|---|---|---|---|---|---|---|---|---|---|---|
| | | Heavy V | Heavy J | Light V | Light J | ID | | ID | | |
| Name | VL | Gene | Gene | Gene | Gene | NO.: | CDRH3 | NO.: | CDRL3 | Sources |
| Sb5 | N/A | IGHV3-3 | IGHJ4 | N/A | N/A | 3224 | YVYVGASY | | N/A | Tania Custodia et al., |
| | | (Alpaca) | (Alpaca) | | | | | | | 2020 |
| | | | | | | | | | | (https://www.biorxiv.or |
| | | | | | | | | | | g/content/10.1101/202 |
| | | | | | | | | | | 0.06.23.165415v1.full.p |
| | | | | | | | | | | df+html) |
| Sb50 | N/A | IGHV3S5 | IGHJ4 | N/A | N/A | 3225 | NVKDWGWL | | N/A | Tania Custodia et al., |
| | | 3 | (Alpaca) | | | | AQYYDY | | | 2020 |
| | | (Alpaca) | | | | | | | | (https://www.biorxiv.or |
| | | | | | | | | | | g/content/10.1101/202 |
| | | | | | | | | | | 0.06.23.165415v1.full.p |
| | | | | | | | | | | df+html) |
| Sb52 | N/A | IGHV3S5 | IGHJ4 | N/A | N/A | 3226 | NVKDEGMW | | N/A | Tania Custodia et al., |
| | | 3 | (Alpaca) | | | | QHYYDY | | | 2020 |
| | | (Alpaca) | | | | | | | | (https://www.biorxiv.or |
| | | | | | | | | | | g/content/10.1101/202 |
| | | | | | | | | | | 0.06.23.165415v1.full.p |
| | | | | | | | | | | df+html) |
| Sb54 | N/A | IGHV3S5 | IGHJ4 | N/A | N/A | 3227 | NVKDEGNSQ | | N/A | Tania Custodia et al., |
| | | 3 | (Alpaca) | | | | SHYDY | | | 2020 |
| | | (Alpaca) | | | | | | | | (https://www.biorxiv.or |
| | | | | | | | | | | g/content/10.1101/202 |
| | | | | | | | | | | 0.06.23.165415v1.full.p |
| | | | | | | | | | | df+html) |
| Sb56 | N/A | IGHV3S5 | IGHJ4 | N/A | N/A | 3228 | NVKDAGNSK | | N/A | Tania Custodia et al., |
| | | 3 | (Alpaca) | | | | ALYDY | | | 2020 |
| | | (Alpaca) | | | | | | | | (https://www.biorxiv.or |
| | | | | | | | | | | g/content/10.1101/202 |
| | | | | | | | | | | 0.06.23.165415v1.full.p |
| | | | | | | | | | | df+html) |
| Sb57 | N/A | IGHV3S5 | IGHJ4 | N/A | N/A | 3229 | NVKDWGRA | | N/A | Tania Custodia et al., |
| | | 3 | (Alpaca) | | | | GARYDY | | | 2020 |
| | | (Alpaca) | | | | | | | | (https://www.biorxiv.or |
| | | | | | | | | | | g/content/10.1101/202 |
| | | | | | | | | | | 0.06.23.165415v1.full.p |
| | | | | | | | | | | df+html) |
| Sb58 | N/A | IGHV3S5 | IGHJ4 | N/A | N/A | 3230 | NVKDMDRW | | N/A | Tania Custodia et al., |
| | | 3 | (Alpaca) | | | | RTTYDY | | | 2020 |
| | | (Alpaca) | | | | | | | | (https://www.biorxiv.or |
| | | | | | | | | | | g/content/10.1101/202 |
| | | | | | | | | | | 0.06.23.165415v1.full.p |
| | | | | | | | | | | df+html) |
| Sb6 | N/A | IGHV3-3 | IGHJ4 | N/A | N/A | 3231 | YVWVGNQY | | N/A | Tania Custodia et al., |
| | | (Alpaca) | (Alpaca) | | | | | | | 2020 |
| | | | | | | | | | | (https://www.biorxiv.or |
| | | | | | | | | | | g/content/10.1101/202 |
| | | | | | | | | | | 0.06.23.165415v1.full.p |
| | | | | | | | | | | df+html) |
| Sb60 | N/A | IGHV3S5 | IGHJ4 | N/A | N/A | 3232 | NVKDWGYEY | | N/A | Tania Custodia et al., |
| | | 3 | (Alpaca) | | | | EGYDY | | | 2020 |
| | | (Alpaca) | | | | | | | | (https://www.biorxiv.or |
| | | | | | | | | | | g/content/10.1101/202 |
| | | | | | | | | | | 0.06.23.165415v1.full.p |
| | | | | | | | | | | df+html) |
| Sb61 | N/A | IGHV3S5 | IGHJ4 | N/A | N/A | 3233 | NVKDTGTYQ | | N/A | Tania Custodia et al., |
| | | 3 | (Alpaca) | | | | AWYDY | | | 2020 |
| | | (Alpaca) | | | | | | | | (https://www.biorxiv.or |
| | | | | | | | | | | g/content/10.1101/202 |
| | | | | | | | | | | 0.06.23.165415v1.full.p |
| | | | | | | | | | | df+html) |
| Sb62 | N/A | IGHV3S5 | IGHJ4 | N/A | N/A | 3234 | NVKDWGGY | | N/A | Tania Custodia et al., |
| | | 3 | (Alpaca) | | | | QWYYDY | | | 2020 |
| | | (Alpaca) | | | | | | | | (https://www.biorxiv.or |
| | | | | | | | | | | g/content/10.1101/202 |
| | | | | | | | | | | 0.06.23.165415v1.full.p |
| | | | | | | | | | | df+html) |
| Sb63 | N/A | IGHV3S5 | IGHJ4 | N/A | N/A | 3235 | NVKDYGAQA | | N/A | Tania Custodia et al., |
| | | 3 | (Alpaca) | | | | HYYDY | | | 2020 |
| | | (Alpaca) | | | | | | | | (https://www.biorxiv.or |
| | | | | | | | | | | g/content/10.1101/202 |
| | | | | | | | | | | 0.06.23.165415v1.full.p |
| | | | | | | | | | | df+html) |

| | | | | | Not | | | | | |
|---|---|---|---|---|---|---|---|---|---|---|
| | Ab | | | Neutral- | Neutral- | | | SEQ | | SEQ |
| | or | | Doesn't | ising | ising | Protein + | | ID | | ID |
| Name | Nb | Binds to | Bind to | Vs | Vs | Epitope | Origin | NO.: | VH or VHH | NO.: |
| Sb67 | Nb | SARS-CoV2 | | | | S; RBD | Phage Display | 1115 | QVQLVESGGGLVQAGGSLRLSCAASGF | |
| | | | | | | | Library (Nanobody, | | PVMWAHMAWYRQAPGKEREWVAAI | |
| | | | | | | | non-immune) | | VSAGAYTHYADSVKGRFTISRDNAKNTV | |
| | | | | | | | | | YLQMNSLKPEDTAVYYCNVKDWGTYNS | |
| | | | | | | | | | YYDYWGQGTQVTVSS | |
| Sb7 | Nb | SARS-CoV2 | | SARS-CoV2 | | S; RBD | Phage Display | 1116 | QVQLVESGGGLVQAGGSLRLSCAASGF | |
| | | | | | | | Library (Nanobody, | | PVNAEEMEWYRQAPGKEREWVAAISS | |
| | | | | | | | non-immune) | | SGDWTYYADSVKGRFTISRDNAKNTVYL | |
| | | | | | | | | | QMNSLKPEDTAVYYCLVYVGSTYIGQGT | |
| | | | | | | | | | QVTVSS | |
| Sb71 | Nb | SARS-CoV2 | | | | S; RBD | Phage Display | 1117 | QVQLVESGGGSVQAGGSLRLSCAASGN | |
| | | | | | | | Library (Nanobody, | | IQHIKYLGWFRQAPGREREGVAALMITR | |
| | | | | | | | non-immune) | | YGQTYYADSVKGRFTVSLDNAKNTVYLQ | |
| | | | | | | | | | MNSLKPEDTALYYCAAAHYGDNFPLAY | |
| | | | | | | | | | QAYLYWGQGTQVTVSS | |
| Sb75 | Nb | SARS-CoV2 | | | | S; RBD | Phage Display | 1118 | QVQLVESGGGSVQAGGSLRLSCAASGYI | |
| | | | | | | | Library (Nanobody, | | NQIYYLGWFRQAPGKEREGVAALNTYQ | |
| | | | | | | | non-immune) | | GQTYYADSVKGRFTVSLDNAKNTVYLQ | |
| | | | | | | | | | MNSLKPEDTALYYCAAARWGRDEPLYH | |
| | | | | | | | | | YYYSYWGQGTQVTVSS | |
| Sb76 | Nb | SARS-CoV2 | | SARS-CoV2 | | S; RBD | Phage Display | 1119 | QVQLVESGGGLVQAGGSLRLSCAASSFP | |
| | | | | | | | Library (Nanobody, | | VDTYHMAWYRQAPGKEREWVAAIVS | |
| | | | | | | | non-immune) | | WGWRTYYADSVKGRFTISRDNAKNTVY | |
| | | | | | | | | | LQMNSLKPEDTAVYYCNVKDIGAQEVH | |
| | | | | | | | | | YDYWGQGTQVTVSS | |
| Sb78 | Nb | SARS-CoV2 | | | | S; RBD | Phage Display | 1120 | QVQLVESGGGSVQAGGSLRLSCAASGYI | |
| | | | | | | | Library (Nanobody, | | KSIKYLGWFRQAPGKEREGVAALMTRY | |
| | | | | | | | non-immune) | | GETYYADSVKGRFTVSLDNAKNTVYLQ | |
| | | | | | | | | | MNSLKPEDTALYYCAAANYGNNWPLTG | |
| | | | | | | | | | VNYWYWGQGTQVTVSS | |
| Sb8 | Nb | SARS-CoV2 | | | | S; RBD | Phage Display | 1121 | QVQLVESGGGLVQAGGSLRLSCAASGF | |
| | | | | | | | Library (Nanobody, | | PVKSYEMEWYRQAPGKEREWVAAISSY | |
| | | | | | | | non-immune) | | GEYTEYADSVKGRFTISRDNAKNTVYLQ | |
| | | | | | | | | | MNSLKPEDTAVYYCYVWVGDSYLGQGT | |
| | | | | | | | | | QVTVSS | |
| Sb83 | Nb | SARS-CoV2 | | | | S; RBD | Phage Display | 1122 | QVQLVESGGGSVQAGGSLRLSCAASGG | |
| | | | | | | | Library (Nanobody, | | ITHIVYLGWFRQAPGKEREGVAALMTR | |
| | | | | | | | non-immune) | | WGTTYYADSVKGRFTVSLDNAKNTVYL | |
| | | | | | | | | | QMNSLKPEDTALYYCAAAKYGQNFPLSY | |
| | | | | | | | | | HAYRYWGQGTQVTVSS | |
| Sb84 | Nb | SARS-CoV2 | | | | S; RBD | Phage Display | 1123 | QVQLVESGGGSVQAGGSLRLSCAASGYI | |
| | | | | | | | Library (Nanobody, | | KHIEYLGWFRQAPGKEREGVAALKTSSG | |
| | | | | | | | non-immune) | | STYYADSVKGRFTVSLDNAKNTVYLQM | |
| | | | | | | | | | NSLKPEDTALYYCAAARYGRSDPLHYHE | |
| | | | | | | | | | YSYWGQGTQVTVSS | |
| Sb85 | Nb | SARS-CoV2 | | | | S; RBD | Phage Display | 1124 | QVQLVESGGGSVQAGGSLRLSCAASGSI | |
| | | | | | | | Library (Nanobody, | | SSITYLGWFRQAPGKEREGVAALVTSRG | |
| | | | | | | | non-immune) | | KTYYADSVKGRFTVSLDNAKNTVYLQM | |
| | | | | | | | | | NSLKPEDTALYYCAAASWGYTWPLYTYD | |
| | | | | | | | | | YWYWGQGTQVTVSS | |
| Sb88 | Nb | SARS-CoV2 | | | | S; RBD | Phage Display | 1125 | QVQLVESGGGLVQAGGSLRLSCAASGF | |
| | | | | | | | Library (Nanobody, | | PVWAHHMLWYRQAPGKEREWVAAIA | |
| | | | | | | | non-immune) | | SWGANTAYADSVKGRFTISRDNAKNTV | |
| | | | | | | | | | YLQMNSLKPEDTAVYYCNVKDSGQYRE | |
| | | | | | | | | | NYDYWGQGTQVTVSS | |
| Sb9 | Nb | SARS-CoV2 | | | | S; RBD | Phage Display | 1126 | QVQLVESGGGLVQAGGSLRLSCAASGF | |
| | | | | | | | Library (Nanobody, | | PVGQQHMYWYRQAPGKEREWVAAIYS | |
| | | | | | | | non-immune) | | YGHITKYADSVKGRFTISRDNAKNTVYLQ | |
| | | | | | | | | | MNSLKPEDTAVYYCWVYVGDYYEGQG | |
| | | | | | | | | | TQVTVSS | |

| | | | | | | SEQ | | SEQ | | |
|---|---|---|---|---|---|---|---|---|---|---|
| | | Heavy V | Heavy J | Light V | Light J | ID | | ID | | |
| Name | VL | Gene | Gene | Gene | Gene | NO.: | CDRH3 | NO.: | CDRL3 | Sources |
| Sb67 | N/A | IGHV3S5 | IGHJ4 | N/A | N/A | 3236 | NVKDWGTYN | | N/A | Tania Custodia et al., |
| | | 3 | (Alpaca) | | | | SYYDY | | | 2020 |
| | | (Alpaca) | | | | | | | | (https://www.biorxiv.or |
| | | | | | | | | | | g/content/10.1101/202 |
| | | | | | | | | | | 0.06.23.165415v1.full.p |
| | | | | | | | | | | df+html) |
| Sb7 | N/A | IGHV3-3 | IGHJ4 | N/A | N/A | 3237 | LVYVGSTY | | N/A | Tania Custodia et al., |
| | | (Alpaca) | (Alpaca) | | | | | | | 2020 |
| | | | | | | | | | | (https://www.biorxiv.or |
| | | | | | | | | | | g/content/10.1101/202 |
| | | | | | | | | | | 0.06.23.165415v1.full.p |
| | | | | | | | | | | df+html) |
| Sb71 | N/A | IGHV3-3 | IGHJ4 | N/A | N/A | 3238 | AAAHYGDNF | | N/A | Tania Custodia et al., |
| | | (Alpaca) | (Alpaca) | | | | PLAYQAYLY | | | 2020 |
| | | | | | | | | | | (https://www.biorxiv.or |
| | | | | | | | | | | g/content/10.1101/202 |
| | | | | | | | | | | 0.06.23.165415v1.full.p |
| | | | | | | | | | | df+html) |
| Sb75 | N/A | IGHV3-3 | IGHJ4 | N/A | N/A | 3239 | AAARWGRDE | | N/A | Tania Custodia et al., |
| | | (Alpaca) | (Alpaca) | | | | PLYHYYYSY | | | 2020 |
| | | | | | | | | | | (https://www.biorxiv.or |
| | | | | | | | | | | g/content/10.1101/202 |
| | | | | | | | | | | 0.06.23.165415v1.full.p |
| | | | | | | | | | | df+html) |
| Sb76 | N/A | IGHV3-3 | IGHJ4 | N/A | N/A | 3240 | NVKDIGAQEV | | N/A | Tania Custodia et al., |
| | | (Alpaca) | (Alpaca) | | | | HYDY | | | 2020 |
| | | | | | | | | | | (https://www.biorxiv.or |
| | | | | | | | | | | g/content/10.1101/202 |
| | | | | | | | | | | 0.06.23.165415v1.full.p |
| | | | | | | | | | | df+html) |
| Sb78 | N/A | IGHV3-3 | IGHJ4 | N/A | N/A | 3241 | AAANYGNN | | N/A | Tania Custodia et al., |
| | | (Alpaca) | (Alpaca) | | | | WPLTGVNYW | | | 2020 |
| | | | | | | | Y | | | (https://www.biorxiv.or |
| | | | | | | | | | | g/content/10.1101/202 |
| | | | | | | | | | | 0.06.23.165415v1.full.p |
| | | | | | | | | | | df+html) |
| Sb8 | N/A | IGHV3-3 | IGHJ4 | N/A | N/A | 3242 | YVWVGDSY | | N/A | Tania Custodia et al., |
| | | (Alpaca) | (Alpaca) | | | | | | | 2020 |
| | | | | | | | | | | (https://www.biorxiv.or |
| | | | | | | | | | | g/content/10.1101/202 |
| | | | | | | | | | | 0.06.23.165415v1.full.p |
| | | | | | | | | | | df+html) |
| Sb83 | N/A | IGHV3-3 | IGHJ4 | N/A | N/A | 3243 | AAAKYGQNF | | N/A | Tania Custodia et al., |
| | | (Alpaca) | (Alpaca) | | | | PLSYHAYRY | | | 2020 |
| | | | | | | | | | | (https://www.biorxiv.or |
| | | | | | | | | | | g/content/10.1101/202 |
| | | | | | | | | | | 0.06.23.165415v1.full.p |
| | | | | | | | | | | df+html) |
| Sb84 | N/A | IGHV3-3 | IGHJ4 | N/A | N/A | 3244 | AAARYGRSDP | | N/A | Tania Custodia et al., |
| | | (Alpaca) | (Alpaca) | | | | LHYHEYSY | | | 2020 |
| | | | | | | | | | | (https://www.biorxiv.or |
| | | | | | | | | | | g/content/10.1101/202 |
| | | | | | | | | | | 0.06.23.165415v1.full.p |
| | | | | | | | | | | df+html) |
| Sb85 | N/A | IGHV3-3 | IGHJ4 | N/A | N/A | 3245 | AAASWGYTW | | N/A | Tania Custodia et al., |
| | | (Alpaca) | (Alpaca) | | | | PLYTYDYWY | | | 2020 |
| | | | | | | | | | | (https://www.biorxiv.or |
| | | | | | | | | | | g/content/10.1101/202 |
| | | | | | | | | | | 0.06.23.165415v1.full.p |
| | | | | | | | | | | df+html) |
| Sb88 | N/A | IGHV3S5 | IGHJ4 | N/A | N/A | 3246 | NVKDSGQYR | | N/A | Tania Custodia et al., |
| | | 3 | (Alpaca) | | | | ENYDY | | | 2020 |
| | | (Alpaca) | | | | | | | | (https://www.biorxiv.or |
| | | | | | | | | | | g/content/10.1101/202 |
| | | | | | | | | | | 0.06.23.165415v1.full.p |
| | | | | | | | | | | df+html) |
| Sb9 | N/A | IGHV3-3 | IGHJ4 | N/A | N/A | 3247 | WVYVGDYY | | N/A | Tania Custodia et al., |
| | | (Alpaca) | (Alpaca) | | | | | | | 2020 |
| | | | | | | | | | | (https://www.biorxiv.or |
| | | | | | | | | | | g/content/10.1101/202 |
| | | | | | | | | | | 0.06.23.165415v1.full.p |
| | | | | | | | | | | df+html) |

| | | | | | Not | | | | | |
|---|---|---|---|---|---|---|---|---|---|---|
| | Ab | | | Neutral- | Neutral- | | | SEQ | | SEQ |
| | or | | Doesn't | ising | ising | Protein + | | ID | | ID |
| Name | Nb | Binds to | Bind to | Vs | Vs | Epitope | Origin | NO.: | VH or VHH | NO.: |
| Sb90 | Nb | SARS-CoV2 | | | | S; RBD | Phage Display | 1127 | QVQLVESGGGSVQAGGSLRLSCAASGA | |
| | | | | | | | Library (Nanobody, | | INQIYYLGWFRQAPGKEREGVAALSTKY | |
| | | | | | | | non-immune) | | GETYYADSVKGRFTVSLDNAKNTVYLQ | |
| | | | | | | | | | MNSLKPEDTALYYCAAARWGRQYPLTF | |
| | | | | | | | | | VYYSYWGQGTQVTVSS | |
| Sb93 | Nb | SARS-CoV2 | | | | S; RBD | Phage Display | 1128 | QVQLVESGGGSVQAGGSLRLSCAASGH | |
| | | | | | | | Library (Nanobody, | | IAQIEYLGWFRQAPGKEREGVAALSTNQ | |
| | | | | | | | non-immune) | | GYTYYADSVKGRFTVSLDNAKNTVYLQ | |
| | | | | | | | | | MNSLKPEDTALYYCAAARWGRTYPLSY | |
| | | | | | | | | | MAYTYWGQGTQVTVSS | |
| Sb94 | Nb | SARS-CoV2 | | | | S; RBD | Phage Display | 1129 | QVQLVESGGGSVQAGGSLRLSCAASGYI | |
| | | | | | | | Library (Nanobody, | | TMIEYLGWFRQAPGKEREGVAALNTHT | |
| | | | | | | | non-immune) | | GGTYYADSVKGRFTVSLDNAKNTVYLQ | |
| | | | | | | | | | MNSLKPEDTALYYCAAARWGRYEPLHY | |
| | | | | | | | | | AYYSYWGQGTQVTVSS | |
| Sb95 | Nb | SARS-CoV2 | | | | S; RBD | Phage Display | 1130 | QVQLVESGGGSVQAGGSLRLSCAASGN | |
| | | | | | | | Library (Nanobody, | | IYNIKYLGWFRQAPGKEREGVAALMTRY | |
| | | | | | | | non-immune) | | GETYYADSVKGRFTVSLDNAKNTVYLQ | |
| | | | | | | | | | MNSLKPEDTALYYCAAASYGANWPLVS | |
| | | | | | | | | | AAYTYWGQGTQVTVSS | |
| Sb97 | Nb | SARS-CoV2 | | | | S; RBD | Phage Display | 1131 | QVQLVESGGGSVQAGGSLRLSCAASGA | |
| | | | | | | | Library (Nanobody, | | ISTIEYLGWFRQAPGREREGVAALYTER | |
| | | | | | | | non-immune) | | GYTYYADSVKGRFTVSLDNAKNTVYLQ | |
| | | | | | | | | | MNSLKPEDTALYYCAAARYGHAQAPLH | |
| | | | | | | | | | YFWYGYWGQGTQVTVSS | |
| SR1 | Nb | SARS-CoV2 | | | | S; RBD | Phage Display | 1132 | QVQLVESGGGLVQAGGSLRLSCAASGF | |
| | | | | | | | Library (Nanobody, | | PVAAYEMEWYRQAPGKEREWVAAINS | |
| | | | | | | | non-immune) | | MGDQTYYADSVKGRFTISRDNAKNTVY | |
| | | | | | | | | | LQMNSLKPEDTAVYYCYVYVGFSYIGQG | |
| | | | | | | | | | TQVTVSS | |
| SR13 | Nb | SARS-CoV2 | | | | S; RBD | Phage Display | 1133 | QVQLVESGGGLVQAGGSLRLSCAASGF | |
| | | | | | | | Library (Nanobody, | | PVDYMEMEWFRQAPGKEREWVAAITS | |
| | | | | | | | non-immune) | | NGRETYYADSVKGRFTVSRDNAKNTVYL | |
| | | | | | | | | | QMNSLKPEDTAVYYCYVYVGSSYIGQGT | |
| | | | | | | | | | QVTVSS | |
| SR18 | Nb | SARS-CoV2 | | | | S; RBD | Phage Display | 1134 | QVQLVESGGGLVQAGGSLRLSCAASGF | |
| | | | | | | | Library (Nanobody, | | PVWFQEMEWYRQAPGKEREWVAAISS | |
| | | | | | | | non-immune) | | QGTHTYYADSVKGRFTISRDNAKNTVYL | |
| | | | | | | | | | QMNSLKPEDTAVYYCYVYVGASYLGQG | |
| | | | | | | | | | TQVTVSS | |
| SR31 | Nb | SARS-CoV2 | | | | S; RBD | Phage Display | 1135 | QVQLVESGGGLVQAGGSLRLSCAASGF | |
| | | | | | | | Library (Nanobody, | | PVWQGEMAWYRQAPGKEREWVAAIS | |
| | | | | | | | non-immune) | | SMGYKTYYADSVKGRFTISRDNAKNTVY | |
| | | | | | | | | | LQMNSLKPEDTAVYYCAVMVGFWYAG | |
| | | | | | | | | | QGTQVTVSS | |
| SR34 | Nb | SARS-CoV2 | | | | S; RBD | Phage Display | 1136 | QVQLVESGGGLVQAGGSLRLSCAAGGF | |
| | | | | | | | Library (Nanobody, | | PVKDHEMEWYRQAPGKEREWVAAITS | |
| | | | | | | | non-immune) | | SGWGTNTYYADSVKGRFTISRDNAKNT | |
| | | | | | | | | | VYLQMNSLKPEDTAVYYCYVYVGSSYIG | |
| | | | | | | | | | QGTQVTVSS | |
| SR38 | Nb | SARS-CoV2 | | | | S; RBD | Phage Display | 1137 | QVQLVESGGGLVQAGGSLRLSCAASGF | |
| | | | | | | | Library (Nanobody, | | PVNQEEMEWYRQAPGKEREWVAAIKS | |
| | | | | | | | non-immune) | | WGTLTAYADSVKGRFTISRDNAKNTVYL | |
| | | | | | | | | | QMNSLKPEDTAVYYCAVHVGQTYIGQG | |
| | | | | | | | | | TQVTVSS | |
| SR4 | Nb | SARS-CoV2 | | | | S; RBD | Phage Display | 1138 | QVQLVESGGGLVQAGGSLRLSCAASGF | |
| | | | | | | | Library (Nanobody, | | PVYSWNMWWYRQAPGKEREWVAAIE | |
| | | | | | | | non-immune) | | SHGDSTRYADSVKGRFTISRDNAKNTVY | |
| | | | | | | | | | LQMNSLKPEDTAVYYCYVWVGHTYYG | |
| | | | | | | | | | QGTQVTVSS | |
| SR5 | Nb | SARS-CoV2 | | | | S; RBD | Phage Display | 1139 | QVQLVESGGGLVQAGGSLRLRCAASGF | |
| | | | | | | | Library (Nanobody, | | PVETTEMEWYRQAPGKEREWVAAISSY | |
| | | | | | | | non-immune) | | GSETYYADSVKGRFTISRDNAKNTVYLQ | |
| | | | | | | | | | MNSLKPEDTAVYYCYVYVGTSYLGQGT | |
| | | | | | | | | | QVTVSS | |
| SR7 | Nb | SARS-CoV2 | | | | S; RBD | Phage Display | 1140 | QVQLVESGGGLVQAGGSLRLSCAASGF | |
| | | | | | | | Library (Nanobody, | | PVWSNEMEWYRQAPGKEREWVAAITS | |
| | | | | | | | non-immune) | | YGTTEYADSVKGRFTISRDNAKNTVYLQ | |
| | | | | | | | | | MNSLKPEDTAVYYCYVYVGYSYIGQGTQ | |
| | | | | | | | | | VTVSS | |

| | | | | | | SEQ | | SEQ | | |
|---|---|---|---|---|---|---|---|---|---|---|
| | | Heavy V | Heavy J | Light V | Light J | ID | | ID | | |
| Name | VL | Gene | Gene | Gene | Gene | NO.: | CDRH3 | NO.: | CDRL3 | Sources |
| Sb90 | N/A | IGHV3-3 | IGHJ4 | N/A | N/A | 3248 | AAARWGRQY | | N/A | Tania Custodia et al., |
| | | (Alpaca) | (Alpaca) | | | | PLTFVYYSY | | | 2020 |
| | | | | | | | | | | (https://www.biorxiv.or |
| | | | | | | | | | | g/content/10.1101/202 |
| | | | | | | | | | | 0.06.23.165415v1.full.p |
| | | | | | | | | | | df+html) |
| Sb93 | N/A | IGHV3-3 | IGHJ4 | N/A | N/A | 3249 | AAARWGRTY | | N/A | Tania Custodia et al., |
| | | (Alpaca) | (Alpaca) | | | | PLSYMAYTY | | | 2020 |
| | | | | | | | | | | (https://www.biorxiv.or |
| | | | | | | | | | | g/content/10.1101/202 |
| | | | | | | | | | | 0.06.23.165415v1.full.p |
| | | | | | | | | | | df+html) |
| Sb94 | N/A | IGHV3-3 | IGHJ4 | N/A | N/A | 3250 | AAARWGRYE | | N/A | Tania Custodia et al., |
| | | (Alpaca) | (Alpaca) | | | | PLHYAYYSY | | | 2020 |
| | | | | | | | | | | (https://www.biorxiv.or |
| | | | | | | | | | | g/content/10.1101/202 |
| | | | | | | | | | | 0.06.23.165415v1.full.p |
| | | | | | | | | | | df+html) |
| Sb95 | N/A | IGHV3-3 | IGHJ4 | N/A | N/A | 3251 | AAASYGANW | | N/A | Tania Custodia et al., |
| | | (Alpaca) | (Alpaca) | | | | PLVSAAYTY | | | 2020 |
| | | | | | | | | | | (https://www.biorxiv.or |
| | | | | | | | | | | g/content/10.1101/202 |
| | | | | | | | | | | 0.06.23.165415v1.full.p |
| | | | | | | | | | | df+html) |
| Sb97 | N/A | IGHV3-3 | IGHJ4 | N/A | N/A | 3252 | AAARYGHAQ | | N/A | Tania Custodia et al., |
| | | (Alpaca) | (Alpaca) | | | | APLHYFWYGY | | | 2020 |
| | | | | | | | | | | (https://www.biorxiv.or |
| | | | | | | | | | | g/content/10.1101/202 |
| | | | | | | | | | | 0.06.23.165415v1.full.p |
| | | | | | | | | | | df+html) |
| SR1 | N/A | IGHV3-3 | IGHJ4 | N/A | N/A | 3253 | YVYVGFSY | | N/A | Tingting Li et al., 2020 |
| | | (Alpaca) | (Alpaca) | | | | | | | (https://www.biorxiv.or |
| | | | | | | | | | | g/content/10.1101/202 |
| | | | | | | | | | | 0.06.09.143438v1) |
| SR13 | N/A | IGHV3-3 | IGHJ4 | N/A | N/A | 3254 | YVYVGSSY | | N/A | Tingting Li et al., 2020 |
| | | (Alpaca) | (Alpaca) | | | | | | | (https://www.biorxiv.or |
| | | | | | | | | | | g/content/10.1101/202 |
| | | | | | | | | | | 0.06.09.143438v1) |
| SR18 | N/A | IGHV3-3 | IGHJ4 | N/A | N/A | 3255 | YVYVGASY | | N/A | Tingting Li et al., 2020 |
| | | (Alpaca) | (Alpaca) | | | | | | | (https://www.biorxiv.or |
| | | | | | | | | | | g/content/10.1101/202 |
| | | | | | | | | | | 0.06.09.143438v1) |
| SR31 | N/A | IGHV3-3 | IGHJ4 | N/A | N/A | 3256 | AVMVGFWY | | N/A | Tingting Li et al., 2020 |
| | | (Alpaca) | (Alpaca) | | | | | | | (https://www.biorxiv.or |
| | | | | | | | | | | g/content/10.1101/202 |
| | | | | | | | | | | 0.06.09.143438v1) |
| SR34 | N/A | IGHV3-3 | IGHJ4 | N/A | N/A | 3257 | YVYVGSSY | | N/A | Tingting Li et al., 2020 |
| | | (Alpaca) | (Alpaca) | | | | | | | (https://www.biorxiv.or |
| | | | | | | | | | | g/content/10.1101/202 |
| | | | | | | | | | | 0.06.09.143438v1) |
| SR38 | N/A | IGHV3-3 | IGHJ4 | N/A | N/A | 3258 | AVHVGQTY | | N/A | Tingting Li et al., 2020 |
| | | (Alpaca) | (Alpaca) | | | | | | | (https://www.biorxiv.or |
| | | | | | | | | | | g/content/10.1101/202 |
| | | | | | | | | | | 0.06.09.143438v1) |
| SR4 | N/A | IGHV3-3 | IGHJ4 | N/A | N/A | 3259 | YVWVGHTY | | N/A | Tingting Li et al., 2020 |
| | | (Alpaca) | (Alpaca) | | | | | | | (https://www.biorxiv.or |
| | | | | | | | | | | g/content/10.1101/202 |
| | | | | | | | | | | 0.06.09.143438v1) |
| SR5 | N/A | IGHV3-3 | IGHJ4 | N/A | N/A | 3260 | YVYVGTSY | | N/A | Tingting Li et al., 2020 |
| | | (Alpaca) | (Alpaca) | | | | | | | (https://www.biorxiv.or |
| | | | | | | | | | | g/content/10.1101/202 |
| | | | | | | | | | | 0.06.09.143438v1) |
| SR7 | N/A | IGHV3S5 | IGHJ4 | N/A | N/A | 3261 | YVYVGYSY | | N/A | Tingting Li et al., 2020 |
| | | 3 | (Alpaca) | | | | | | | (https://www.biorxiv.or |
| | | (Alpaca) | | | | | | | | g/content/10.1101/202 |
| | | | | | | | | | | 0.06.09.143438v1) |

| | | | | | Not | | | | | |
|---|---|---|---|---|---|---|---|---|---|---|
| | Ab | | | Neutral- | Neutral- | | | SEQ | | SEQ |
| | or | | Doesn't | ising | ising | Protein + | | ID | | ID |
| Name | Nb | Binds to | Bind to | Vs | Vs | Epitope | Origin | NO.: | VH or VHH | NO.: |
| Ty1 | Nb | SARS-CoV2 | | SARS-CoV2 | | S; RBD | Immunised Alpaca | 1141 | QVQLVETGGGLVQPGGSLRLSCAASGF | |
| | | | | | | | | | TFSSVYMNWVRQAPGKGPEWVSRISP | |
| | | | | | | | | | NSGNIGYTDSVKGRFTISRDNAKNTLYL | |
| | | | | | | | | | QMNNLKPEDTALYYCAIGLNLSSSSVRG | |
| | | | | | | | | | QGTQVTVSS | |
| VH-Fc- | Nb | SARS-CoV2 | | SARS-CoV2 | | S; RBD | Phage Display | | ND | |
| B01 | | | | | | | (Human) | | | |
| VH2-A01. | Nb | SARS-CoV2 | | SARS-CoV2 | | S; RBD | Phage Display | | ND | |
| B01 | | | | | | | (Human) | | | |
| VH2-A01- | Nb | SARS-CoV2 | | SARS-CoV2 | | S; RBD | Phage Display | | ND | |
| B02 | | | | | | | (Human) | | | |
| VH3-B01 | Nb | SARS-CoV2 | | SARS-CoV2 | | S; RBD | Phage Display | | ND | |
| | | | | | | | (Human) | | | |
| VHH-72 | Nb | SARS-CoV1, | | SARS-CoV2 | | S; RBD | Immunised Llama | 1142 | QVQLQESGGGLVQAGGSLRLSCAASGR | |
| | | SARS-CoV2 | | and SARS- | | | | | TFSEYAMGWFRQAPGKEREFVATISWS | |
| | | | | CoV1 | | | | | GGSTYYTDSVKGRFTISRDNAKNTVYLQ | |
| | | | | | | | | | MNSLKPDDTAVYYCAAAGLGTVVSEW | |
| | | | | | | | | | DYDYDYWGQGTQVTVSS | |
| W23UACh | Nb | SARS-CoV2 | | | | S; RBD | Immunised Alpaca | 1143 | QVQLVESGGGLVQPGESLRLSCAASGNI | |
| | | | | | | | | | FGIAAVHWFRKAPGKEREFTAGFGSDG | |
| | | | | | | | | | STNYANSVKGRFTISRDNAKNTTYLQMN | |
| | | | | | | | | | SLKPEDTAVYYCHALIKNELGFLDYWGP | |
| | | | | | | | | | GTQVTVSS | |
| W25UACh | Nb | SARS-CoV2 | | | | S; RBD | Immunised Alpaca | 1144 | QVQLVESGGGLVQPGESLRLSCAASGSI | |
| | | | | | | | | | FGIYAVHWFRMAPGKEREFTAGFGSHG | |
| | | | | | | | | | STNYAASVKGRFTMSRDNAKNTTYLQM | |
| | | | | | | | | | NSLKPADTAVYYCHALIKNELGFLDYWG | |
| | | | | | | | | | PGTQVTVSS | |

| | | | | | | SEQ | | SEQ | | |
|---|---|---|---|---|---|---|---|---|---|---|
| | | Heavy V | Heavy J | Light V | Light J | ID | | ID | | |
| Name | VL | Gene | Gene | Gene | Gene | NO.: | CDRH3 | NO.: | CDRL3 | Sources |
| Ty1 | N/A | IGHV3S1 | IGHJ4 | N/A | N/A | 3262 | AIGLNLSSSSV | | N/A | Leo Hanke et al., 2020 |
| | | (Alpaca) | (Alpaca) | | | | | | | (https://www.biorxiv.or |
| | | | | | | | | | | g/content/10.1101/202 |
| | | | | | | | | | | 0.06.02.130161v1) |
| VH-Fc- | ND | ND | ND | ND | ND | | ND | | ND | Colton J. Bracken et al., |
| B01 | | | | | | | | | | 2020 |
| | | | | | | | | | | (https://www.biorxiv.or |
| | | | | | | | | | | g/content/10.1101/202 |
| | | | | | | | | | | 0.08.08.242511v1.full.p |
| | | | | | | | | | | df) |
| VH2-A01. | ND | ND | ND | ND | ND | | ND | | ND | Colton J. Bracken et al., |
| B01 | | | | | | | | | | 2020 |
| | | | | | | | | | | (https://www.biorxiv.or |
| | | | | | | | | | | g/content/10.1101/202 |
| | | | | | | | | | | 0.08.08.242511v1.full.p |
| | | | | | | | | | | df) |
| VH2-A01- | ND | ND | ND | ND | ND | | ND | | ND | Colton J. Bracken et al., |
| B02 | | | | | | | | | | 2020 |
| | | | | | | | | | | (https://www.biorxiv.or |
| | | | | | | | | | | g/content/10.1101/202 |
| | | | | | | | | | | 0.08.08.242511v1.full.p |
| | | | | | | | | | | df) |
| VH3-B01 | ND | ND | ND | ND | ND | | ND | | ND | Colton J. Bracken et al., |
| | | | | | | | | | | 2020 |
| | | | | | | | | | | (https://www.biorxiv.or |
| | | | | | | | | | | g/content/10.1101/202 |
| | | | | | | | | | | 0.08.08.242511v1.full.p |
| | | | | | | | | | | df) |
| VHH-72 | N/A | IGHV3-3 | IGHJ4 | N/A | N/A | 3263 | AAAGLGTVVS | | N/A | Daniel Wrapp et al., |
| | | (Alpaca) | (Alpaca) | | | | EWDYDYDY | | | 2020 |
| | | | | | | | | | | (https://www.sciencedi |
| | | | | | | | | | | rect.com/science/articl |
| | | | | | | | | | | e/pii/S00928674203049 |
| | | | | | | | | | | 43) |
| W23UACh | N/A | IGHV3S5 | IGHJ4 | N/A | N/A | 3264 | HALIKNELGFL | | N/A | Guillermo Nieto et al., |
| | | 3 | (Alpaca) | | | | DY | | | 2020 |
| | | (Alpaca) | | | | | | | | (https://www.biorxiv.or |
| | | | | | | | | | | g/content/10.1101/202 |
| | | | | | | | | | | 0.06.09.137935v1) |
| W25UACh | N/A | IGHV3S5 | IGHJ4 | N/A | N/A | 3265 | HALIKNELGFL | | N/A | Guillermo Nieto et al., |
| | | 3 | (Alpaca) | | | | DY | | | 2020 |
| | | (Alpaca) | | | | | | | | (https://www.biorxiv.or |
| | | | | | | | | | | g/content/10.1101/202 |
| | | | | | | | | | | 0.06.09.137935v1) |

[0329] All publications and patents mentioned in the present application are herein incorporated by reference. Various modification and variation of the described methods and compositions of the invention will be apparent to those skilled in the art without departing from the scope and spirit of the invention. Although the invention has been described in connection with specific preferred embodiments, it should be understood that the invention as claimed should not be unduly limited to such specific embodiments. Indeed, various modifications of the described modes for carrying out the invention that are obvious to those skilled in the relevant fields are intended to be within the scope of the following claims.

The application's sequence listing, which the Patent Office published only in electronic form, follows.

SEQUENCE LISTING (4300 sequences)

SEQ ID NO: 1 - protein, 7 aa, Simian vacuolating virus 40
PKKKRKV

SEQ ID NO: 2 - protein, 13 aa, Herpes simplex virus
IDMLIDLGLDLSD

SEQ ID NO: 3 - protein, 29 aa, Ovis aries
MMSFVSLLLVGILFWATEAEQLTKCEVFQ

SEQ ID NO: 4 - protein, 4 aa, synthetic construct
  source 1..4: note = Synthetic
KDEL

SEQ ID NO: 5 - protein, 25 aa, Saccharomyces cerevisiae
MLSLRQSIRFFKPATRTLCSSRYLL

SEQ ID NO: 6 - protein, 39 aa, Pisum sativum
MVAMAMASLQSSMSSLSLSSNSFLGQPLSPITLSPFLQG

SEQ ID NO: 7 - protein, 7 aa, synthetic construct
  source 1..7: note = Synthetic
  VARIANT 1: note = X is S or T
  VARIANT 4: note = X can be any naturally occurring amino acid
XRRXFLK

SEQ ID NO: 8 - skipped

SEQ ID NO: 9 - protein, 13 aa, synthetic construct
  source 1..13: note = Synthetic
  VARIANT 1..4: note = X can be any naturally occurring amino acid
  VARIANT 7..11: note = X can be any naturally occurring amino acid
XXXXRLXXXXXHL

SEQ ID NO: 10 - DNA, 5533 bp, synthetic construct
  source 1..5533: mol_type = other DNA; note = Synthetic
cactatgtgttaattaaaattatctctaaggcatgtgaactggctgtcttggttttcatctgtacttcatctgctacctctgtgacctgaaacatatttataattccattaagctgtgcatatgatagatttatcatatgtattttccttaaaggatttttgtaagaactaattgaattgatacctgtaaagtctttatcacactacccaataaataataaatctctttgttcagctctctgtttctataaatatgtaccagttttattgtttttagtggtagtgattttattctctttctatatatatacacacacatgtgtgcattcataaatatatacaatttttatgaataaaaaattattagcaatcaatattgaaaaccactgatttttgtttatgtgagcaaacagcagattaaaaggaatttgaattctcatagctagcaggagtcaatgggaaaaacccattggagccaagtacactgactcaatagggactttccattgggttttgcccagtacataaggtcaatagggggtgagtcaacaggaaagtcccattggagccaagtacattgagtcaatagggactttccaatgggttttgcccagtacataaggtcaatgggaggtaagccaatgggtttttcccattactgacatgtatactgagtcattagggactttccaatgggttttgcccagtacataaggtcaataggggtgaatcaacaggaaagtcccattggagccaagtacactgagtcaatagggactttccattgggttttgcccagtacaaaaggtcaatagggggtgagtcaatgggtttttcccattattggcacatacataaggtcaataggggtgactagtggagaagagcatgcttgagggctgagtgcccctcagtgggcagagagcacatggcccacagtccctgagaagttggggggaggggtgggcaattgaactggtgcctagagaaggtggggcttgggtaaactgggaaagtgatgtggtgtactggctccacctttttccccagggtgggggagaaccatatataagtgcagtagtctctgtgaacattcaagcttctgccttctccctcctgtgagtttggtaagtcactgactgtctatgcctgggaaagggtgggcaggagatggggcagtgcaggaaaagtggcactatgaaccctgcagccctagacaattgtactaaccttcttctctttcctctcctgacaggttggtaaccaagccaccatgggatggtccctgatcctgctgtttctggtggctgtggccaccagagtgctgtctgaagtgcagctggtggaaagtggtggtggcctggttcagcctggtggctctctgagactgagctgtgctgcctctggcttcattgtgtccagcaactacatgagctgggtcagacaggcccctggcaaaggactggaatgggtgtcagtgatctacagtggtggcagcacctactatgctgactctgtgaagggcagattcaccatcagcagacacaacagcaagaacaccctgtacctgcagatgaacagcctgagagctgaggacactgctgtgtactactgtgccagagaagcctatggcatggatgtgtggggccagggcacaacagtgactgtgtcctctgccagcacaaagggcccctctgtgtttcctctggctcccagcagcaagagcaccagtggtggaacagctgccctgggctgtctggtcaaggactactttcctgagcctgtgacagtgtcctggaactctggggctctgacatctggggtgcacacattccctgcagtgctgcagtcctctggcctgtacagcctgtcctctgtggtcacagtgcctagctctagcctgggcacccagacctacatctgcaatgtgaaccacaagcctagcaacaccaaggtggacaagaaggctgagcccaagagctgtgacaagacccacacctgtcctccatgtcctgctccagagctgcttggaggaccatcagtgtttctgttccctccaaagcctaaggacaccctgatgatcagcagaacccctgaagtgacctgtgtggtggttgatgtgtcccatgaggacccagaagtgaagttcaattggtatgtggatggtgttgaggtgcacaatgccaagaccaagcctagagaggaacagtacaactccacctacagagtggtttctgtgctgacagtgctccaccaggactggctgaatggcaaagagtacaagtgcaaggtgtccaacaaggccctgcctgctcctattgaaaagaccatctccaaggccaagggccagcctagggaaccccaggtttacacactgccacctagcagggatgagctgaccaagaaccaggtgtccctgacatgcctggttaagggcttctacccctctgacattgctgtggaatgggagagcaatggccagccagagaacaactacaagacaacccctcctgtgctggactctgatggctcattcttcctgtactccaagctgactgtggacaagtccagatggcagcagggcaatgtctttagctgctctgtgatgcatgaggccctgcacaaccactacacacagaagtccctgtctctgagccctggcaagagaaagagaaggagtggctctggggccaccaacttcagcctgctgaaacaggctggggatgttgaagagaaccctggacctatggcctgggctctgctgcttctgggactgctgtctcactgcactggctctgtgacagacattgtgatgacccagtctccatccttcctgagtgcctctgtgggagacagagtgaccatcacctgtagagccagccagggcatcagctcttacctggcttggtatcagcaaaagcctggcaaggcccctaagctgctgatctatgctgcctccacactgcagtcaggggtgccctccagattttctggctctggatctggcactgagttcaccctgaccatcagctccctgcagcctgaggactttgccacctactactgccagcagctgaacagctaccctccttacacctttggacagggcaccaagctggaaatcaagggaacaaagctgacagtcctgggccagccaaaggctgctccttctgtgacactgttcccacctagctctgaggaactgcaggctaacaaggctacccttgtgtgcctgatctctgacttctacccaggggctgtgactgtggcttggaaggctgatagcagccctgtgaaggctggggttgagacaaccacacctagcaagcagagcaacaacaaatatgctgccagctcctacctgagtctgacccctgagcagtggaagtcccacagatcctacagctgccaagtgacccatgagggctccacagtggaaaagacagtggccccaacagagtgctcctgaagatctacttctggctaataaaagatcagagctctagtgatctgtgtgttggttttttgtgtctgcattctagcaagtcaatatgttcaccccaaaaaagctgtttgttaacttgtcaacctcattctaaaatgtatatagaagcccaaaagacaataacaaaaatattcttgtagaacaaaatgggaaagaatgttccactaaatatcaagatttagagcaaagcatgagatgtgtggggatagacagtgaggctgataaaatagagtagagctcagaaacagacccattgatatatgtaagtgacctatgaaaaaaatatggcattttacaatgggaaaatgatggtctttttcttttttagaaaaacagggaaatatatttatatgtaaaaaataaaagggaacccatatgtcataccatacacacaaaaaaattccagtgaattataagtctaaatggagaaggcaaaactttaaatcttttagaaaataatatagaagcatgccatcaagacttcagtgtagagaaaaatttcttatgactcaaagtcctaaccacaaagaaaagattgttaattagattgcatgaatattaagacttatttttaaaattaaaaaaccattaagaaaagtcaggccatagaatgacagaaaatatttgcaacaccccagtaaagagaattgtaatatgcagattataaaaagaagtcttacaaatcagtaaaaaataaaactagacaaaaatttgaacagatgaaagagaaactctaaataatcattacacatgagaaactcaatctcagaaatcagagaactatcattgcatatacactaaattagagaaatattaaaaggctaagtaacatctgtggcttaattaatctagctctagtgatcagcagttcaacctgttgatagtatgtactaagctctcatgtttaatgtactaagctctcatgtttaatgaactaaaccctcatggctaatgtactaagctctcatggctaatgtactaagctctcatgtttcatgtactaagctctcatgtttgaacaataaaattaatataaatcagcaacttaaatagcctctaaggttttaagttttataagaaaaaaaagaatatataaggcttttaaaggttttaaggtttcctaggttatcctcatatgagctcttagaaaaactcatccagcatcaaatgaaactgcaatttattcatatcaggattatcaataccatatttttgaaaaagtcttttctgtaatgaaggagaaaactcacccaggcagttccataggatggcaagatcctggtatctgtctgcaattccaactcttccaacatcaatacaacctattaatttcccctcatcaaaaataaggttatcaagtgagaaatcaccatgagtgaccactgaatctggtgagaatggcaaaagattatgcatttctttccagacttgttcaacaggccagccatttctctcatcatcaaaatcactggcatcaaccaaaccattattcattcttgattgggcctgagccagtctaaatactctatcagagttaaaaggacaattacaaacaggaatggaatgcaatcttctcaggaacactgccagggcatcaacaatattttcacctgaatcaggatattcttccaatacctggaatgctgttttccctgggatggcagtggtgagtaaccatgcatcatcaggagttctgataaaatgcttgatggttggaagaggcataaattcagtcagccagtttagtctgaccatctcatctgtaacatcattggcaacagaacctttgccatgtttcagaaacaactctggggcatctggcttcccatacaatctatagattgtggcacctgattgcccaacattatctctagcccatttatacccatataaatcagcatccatgttggaatttaatcttggcctggagcaagaggtttctctttgaatatggctcatacatgtgcacctcctatagtgagttgtattatactatgcagatatactatgccaatgtttaattgtcag

SEQ ID NO: 11 - DNA, 7318 bp, synthetic construct
  source 1..7318: mol_type = other DNA; note = Synthetic
cactatgtgttaattaaaattatctctaaggcatgtgaactggctgtcttggttttcatctgtacttcatctgctacctctgtgacctgaaacatatttataattccattaagctgtgcatatgatagatttatcatatgtattttccttaaaggatttttgtaagaactaattgaattgatacctgtaaagtctttatcacactacccaataaataataaatctctttgttcagctctctgtttctataaatatgtaccagttttattgtttttagtggtagtgattttattctctttctatatatatacacacacatgtgtgcattcataaatatatacaatttttatgaataaaaaattattagcaatcaatattgaaaaccactgatttttgtttatgtgagcaaacagcagattaaaaggaatttgaattctcatagctagcaggagtcaatgggaaaaacccattggagccaagtacactgactcaatagggactttccattgggttttgcccagtacataaggtcaatagggggtgagtcaacaggaaagtcccattggagccaagtacattgagtcaatagggactttccaatgggttttgcccagtacataaggtcaatgggaggtaagccaatgggtttttcccattactgacatgtatactgagtcattagggactttccaatgggttttgcccagtacataaggtcaataggggtgaatcaacaggaaagtcccattggagccaagtacactgagtcaatagggactttccattgggttttgcccagtacaaaaggtcaatagggggtgagtcaatgggtttttcccattattggcacatacataaggtcaataggggtgactagtggagaagagcatgcttgagggctgagtgcccctcagtgggcagagagcacatggcccacagtccctgagaagttggggggaggggtgggcaattgaactggtgcctagagaaggtggggcttgggtaaactgggaaagtgatgtggtgtactggctccacctttttccccagggtgggggagaaccatatataagtgcagtagtctctgtgaacattcaagcttctgccttctccctcctgtgagtttggtaagtcactgactgtctatgcctgggaaagggtgggcaggagatggggcagtgcaggaaaagtggcactatgaaccctgcagccctagacaattgtactaaccttcttctctttcctctcctgacaggttggtaaccaagccaccatgggatggtccctgatcctgctgtttctggtggctgtggccaccagagtgctgtctgaagtgcagctggtggaaagtggtggtggcctggttcagcctggtggctctctgagactgagctgtgctgcctctggcttcattgtgtccagcaactacatgagctgggtcagacaggcccctggcaaaggactggaatgggtgtcagtgatctacagtggtggcagcacctactatgctgactctgtgaagggcagattcaccatcagcagacacaacagcaagaacaccctgtacctgcagatgaacagcctgagagctgaggacactgctgtgtactactgtgccagagaagcctatggcatggatgtgtggggccagggcacaacagtgactgtgtcctctgccagcacaaagggcccctctgtgtttcctctggctcccagcagcaagagcaccagtggtggaacagctgccctgggctgtctggtcaaggactactttcctgagcctgtgacagtgtcctggaactctggggctctgacatctggggtgcacacattccctgcagtgctgcagtcctctggcctgtacagcctgtcctctgtggtcacagtgcctagctctagcctgggcacccagacctacatctgcaatgtgaaccacaagcctagcaacaccaaggtggacaagaaggctgagcccaagagctgtgacaagacccacacctgtcctccatgtcctgctccagagctgcttggaggaccatcagtgtttctgttccctccaaagcctaaggacaccctgatgatcagcagaacccctgaagtgacctgtgtggtggttgatgtgtcccatgaggacccagaagtgaagttcaattggtatgtggatggtgttgaggtgcacaatgccaagaccaagcctagagaggaacagtacaactccacctacagagtggtttctgtgctgacagtgctccaccaggactggctgaatggcaaagagtacaagtgcaaggtgtccaacaaggccctgcctgctcctattgaaaagaccatctccaaggccaagggccagcctagggaaccccaggtttacacactgccacctagcagggatgagctgaccaagaaccaggtgtccctgacatgcctggttaagggcttctacccctctgacattgctgtggaatgggagagcaatggccagccagagaacaactacaagacaacccctcctgtgctggactctgatggctcattcttcctgtactccaagctgactgtggacaagtccagatggcagcagggcaatgtctttagctgctctgtgatgcatgaggccctgcacaaccactacacacagaagtccctgtctctgagccctggcaagtgaagatctacttctggctaataaaagatcagagctctagtgatctgtgtgttggttttttgtgtctgcattctagcagagccccactgtgttcatcttacagatggaaatactgacattcagaggagttagttaacttgcctaggtgattcagctaataagtgcaagaaagatttcaatccaaggtgatttgattctgaagcctgtgctaatcacattacaccaagctacaacttcatttataaataataagtcagctttcaagggcctttcaggtgtcctgcacttctacaagctgtgccatttagtgaacacaaaatgagccttctgatgaagtagtcttttcattatttcagatattagaacactaaaattcttagctgccagctgattgaaggctgggacaaaattcaaacatgcatctacaacaatatatatctcaatgttagtctccaaattctattgacttcaactcaagagaatataaagagctagtctttatacactctttaaggtatgatatcatctggaaagtaacaaaattgatgcaaatttgaatgaactttatcatggtgtatttacacaatgtgtttcttctccctgcaatgtatttctttctctaattccttccatttgatctttcatacacaatctggttctgatgtatgttttttggatgcacttttcaactccaaaagacagagctagttactttcttcctggtgctccaagcactgtatttgtatctgtattcaagccctttgcaatattgtactggatcattatttcacctctaggatggcttccccaggcaacttgtgttcacccagagactacattttgtatcttgttgacctttgaacttccaccagtgtctaaaaataatatgtatgcaaaattacttgctatgagaatgtataattaaacaatataaaaaggagaagcaaggagagaaacacaggtgtgtatttgtgtttgtgtgcttaaaaggcagtgtggaaaaggaagaaatgccatttatagtgaggagacaaagttatattacctcttatctggcttttaaggagattttgctgagctaaaaatcctatattcatagaaaagccttacctgagttgccaatacctcaattcagtctagctgttacataacttatggtaaatggcctgcctggctgactgcccaatgacccctgcccaatgatgtcaataatgatgtatgttcccatgtaatgccaatagggactttccattgatgtcaatgggtggagtatttatggtaactgcccacttggcagtacatcaagtgtatcatatgccaagtatgccccctattgatgtcaatgatggtaaatggcctgcctggcattatgcccagtacatgaccttatgggactttcctacttggcagtacatctatgtattagtcattgctattaccatggattagtggagaagagcatgcttgagggctgagtgcccctcagtgggcagagagcacatggcccacagtccctgagaagttggggggaggggtgggcaattgaactggtgcctagagaaggtggggcttgggtaaactgggaaagtgatgtggtgtactggctccacctttttccccagggtgggggagaaccatatataagtgcagtagtctctgtgaacattcaagcttctgccttctccctcctgtgagtttggatgcacctactagatatcttggtaagtcactgactgtctatgcctgggaaagggtgggcaggaggtggggcagtgcaggaaaagtggcactgtgaaccctgcagccctagacaattgtactaaccttcttctctttcctctcctgacaggttggtaaccaagccaccatggcctgggctctgctgcttctgggactgctgtctcactgcactggctctgtgacagacattgtgatgacccagtctccatccttcctgagtgcctctgtgggagacagagtgaccatcacctgtagagccagccagggcatcagctcttacctggcttggtatcagcaaaagcctggcaaggcccctaagctgctgatctatgctgcctccacactgcagtcaggggtgccctccagattttctggctctggatctggcactgagttcaccctgaccatcagctccctgcagcctgaggactttgccacctactactgccagcagctgaacagctaccctccttacacctttggacagggcaccaagctggaaatcaagggaacaaagctgacagtcctgggccagccaaaggctgctccttctgtgacactgttcccacctagctctgaggaactgcaggctaacaaggctacccttgtgtgcctgatctctgacttctacccaggggctgtgactgtggcttggaaggctgatagcagccctgtgaaggctggggttgagacaaccacacctagcaagcagagcaacaacaaatatgctgccagctcctacctgagtctgacccctgagcagtggaagtcccacagatcctacagctgccaagtgacccatgagggctccacagtggaaaagacagtggccccaacagagtgctcctgaagatctacttctggctaataaaagatcagagctctagtgatctgtgtgttggttttttgtgtctgcattctagcagtcaatatgttcaccccaaaaaagctgtttgttaacttgtcaacctcattctaaaatgtatatagaagcccaaaagacaataacaaaaatattcttgtagaacaaaatgggaaagaatgttccactaaatatcaagatttagagcaaagcatgagatgtgtggggatagacagtgaggctgataaaatagagtagagctcagaaacagacccattgatatatgtaagtgacctatgaaaaaaatatggcattttacaatgggaaaatgatggtctttttcttttttagaaaaacagggaaatatatttatatgtaaaaaataaaagggaacccatatgtcataccatacacacaaaaaaattccagtgaattataagtctaaatggagaaggcaaaactttaaatcttttagaaaataatatagaagcatgccatcaagacttcagtgtagagaaaaatttcttatgactcaaagtcctaaccacaaagaaaagattgttaattagattgcatgaatattaagacttatttttaaaattaaaaaaccattaagaaaagtcaggccatagaatgacagaaaatatttgcaacaccccagtaaagagaattgtaatatgcagattataaaaagaagtcttacaaatcagtaaaaaataaaactagacaaaaatttgaacagatgaaagagaaactctaaataatcattacacatgagaaactcaatctcagaaatcagagaactatcattgcatatacactaaattagagaaatattaaaaggctaagtaacatctgtggcttaattaatctagctctagtgatcagcagttcaacctgttgatagtatgtactaagctctcatgtttaatgtactaagctctcatgtttaatgaactaaaccctcatggctaatgtactaagctctcatggctaatgtactaagctctcatgtttcatgtactaagctctcatgtttgaacaataaaattaatataaatcagcaacttaaatagcctctaaggttttaagttttataagaaaaaaaagaatatataaggcttttaaaggttttaaggtttcctaggttatcctcatatgagctcttagaaaaactcatccagcatcaaatgaaactgcaatttattcatatcaggattatcaataccatatttttgaaaaagtcttttctgtaatgaaggagaaaactcacccaggcagttccataggatggcaagatcctggtatctgtctgcaattccaactcttccaacatcaatacaacctattaatttcccctcatcaaaaataaggttatcaagtgagaaatcaccatgagtgaccactgaatctggtgagaatggcaaaagattatgcatttctttccagacttgttcaacaggccagccatttctctcatcatcaaaatcactggcatcaaccaaaccattattcattcttgattgggcctgagccagtctaaatactctatcagagttaaaaggacaattacaaacaggaatggaatgcaatcttctcaggaacactgccagggcatcaacaatattttcacctgaatcaggatattcttccaatacctggaatgctgttttccctgggatggcagtggtgagtaaccatgcatcatcaggagttctgataaaatgcttgatggttggaagaggcataaattcagtcagccagtttagtctgaccatctcatctgtaacatcattggcaacagaacctttgccatgtttcagaaacaactctggggcatctggcttcccatacaatctatagattgtggcacctgattgcccaacattatctctagcccatttatacccatataaatcagcatccatgttggaatttaatcttggcctggagcaagaggtttctctttgaatatggctcatacatgtgcacctcctatagtgagttgtattatactatgcagatatactatgccaatgtttaattgtcag

SEQ ID NO: 12 - DNA, 5524 bp, synthetic construct
  source 1..5524: mol_type = other DNA; note = Synthetic
cactatgtgttaattaaaattatctctaaggcatgtgaactggctgtcttggttttcatctgtacttcatctgctacctctgtgacctgaaacatatttataattccattaagctgtgcatatgatagatttatcatatgtattttccttaaaggatttttgtaagaactaattgaattgatacctgtaaagtctttatcacactacccaataaataataaatctctttgttcagctctctgtttctataaatatgtaccagttttattgtttttagtggtagtgattttattctctttctatatatatacacacacatgtgtgcattcataaatatatacaatttttatgaataaaaaattattagcaatcaatattgaaaaccactgatttttgtttatgtgagcaaacagcagattaaaaggaatttgaattctcatagctagcaggagtcaatgggaaaaacccattggagccaagtacactgactcaatagggactttccattgggttttgcccagtacataaggtcaatagggggtgagtcaacaggaaagtcccattggagccaagtacattgagtcaatagggactttccaatgggttttgcccagtacataaggtcaatgggaggtaagccaatgggtttttcccattactgacatgtatactgagtcattagggactttccaatgggttttgcccagtacataaggtcaataggggtgaatcaacaggaaagtcccattggagccaagtacactgagtcaatagggactttccattgggttttgcccagtacaaaaggtcaatagggggtgagtcaatgggtttttcccattattggcacatacataaggtcaataggggtgactagtggagaagagcatgcttgagggctgagtgcccctcagtgggcagagagcacatggcccacagtccctgagaagttggggggaggggtgggcaattgaactggtgcctagagaaggtggggcttgggtaaactgggaaagtgatgtggtgtactggctccacctttttccccagggtgggggagaaccatatataagtgcagtagtctctgtgaacattcaagcttctgccttctccctcctgtgagtttggtaagtcactgactgtctatgcctgggaaagggtgggcaggagatggggcagtgcaggaaaagtggcactatgaaccctgcagccctagacaattgtactaaccttcttctctttcctctcctgacaggttggtaaccaagccaccatgggatggtccctgatcctgctgtttctggtggctgtggccaccagagtgctgtctgaagtgcagctggtggaaagtggtggtggcctggttcagcctggtggctctctgagactgagctgtgctgcctctggcttcattgtgtccagcaactacatgagctgggtcagacaggcccctggcaaaggactggaatgggtgtcagtgatctacagtggtggcagcacctactatgctgactctgtgaagggcagattcaccatcagcagacacaacagcaagaacaccctgtacctgcagatgaacagcctgagagctgaggacactgctgtgtactactgtgccagagaagcctatggcatggatgtgtggggccagggcacaacagtgactgtgtcctctgccagcacaaagggcccctctgtgtttcctctggctcccagcagcaagagcaccagtggtggaacagctgccctgggctgtctggtcaaggactactttcctgagcctgtgacagtgtcctggaactctggggctctgacatctggggtgcacacattccctgcagtgctgcagtcctctggcctgtacagcctgtcctctgtggtcacagtgcctagctctagcctgggcacccagacctacatctgcaatgtgaaccacaagcctagcaacaccaaggtggacaagaaggctgagcccaagagctgtgacaagacccacacctgtcctccatgtcctgctccagagctgcttggaggaccatcagtgtttctgttccctccaaagcctaaggacaccctgatgatcagcagaacccctgaagtgacctgtgtggtggttgatgtgtcccatgaggacccagaagtgaagttcaattggtatgtggatggtgttgaggtgcacaatgccaagaccaagcctagagaggaacagtacaactccacctacagagtggtttctgtgctgacagtgctccaccaggactggctgaatggcaaagagtacaagtgcaaggtgtccaacaaggccctgcctgctcctattgaaaagaccatctccaaggccaagggccagcctagggaaccccaggtttacacactgccacctagcagggatgagctgaccaagaaccaggtgtccctgacatgcctggttaagggcttctacccctctgacattgctgtggaatgggagagcaatggccagccagagaacaactacaagacaacccctcctgtgctggactctgatggctcattcttcctgtactccaagctgactgtggacaagtccagatggcagcagggcaatgtctttagctgctctgtgatgcatgaggccctgcacaaccactacacacagaagtccctgtctctgagccctggcaagagaaagagaaggagtggctctggggccaccaacttcagcctgctgaaacaggctggggatgttgaagagaaccctggacctatggacttccaggtgcagatcatcagctttctgcttatctctgccagtgtgatcatgagcaggggagacattgtgatgacccagtctccatccttcctgagtgcctctgtgggagacagagtgaccatcacctgtagagccagccagggcatcagctcttacctggcttggtatcagcaaaagcctggcaaggcccctaagctgctgatctatgctgcctccacactgcagtcaggggtgccctccagattttctggctctggatctggcactgagttcaccctgaccatcagctccctgcagcctgaggactttgccacctactactgccagcagctgaacagctaccctccttacacctttggacagggcaccaagctggaaatcaagaggacagtggctgctccttctgtgttcatcttcccaccatcagatgaacagctgaagagtggcacagcctctgttgtgtgcctgctcaacaacttctaccctagagaagccaaggtgcagtggaaagtggacaatgccctccagtctggcaacagccaagaatctgtgactgagcaggactccaaggacagcacatacagcctgagcagcacactgaccctgagcaaggctgactatgagaagcacaaagtctatgcctgtgaagtgacacaccagggcctgtctagcccagtgaccaagtccttcaacaggggagagtgttgaagatctacttctggctaataaaagatcagagctctagtgatctgtgtgttggttttttgtgtctgcattctagcaagtcaatatgttcaccccaaaaaagctgtttgttaacttgtcaacctcattctaaaatgtatatagaagcccaaaagacaataacaaaaatattcttgtagaacaaaatgggaaagaatgttccactaaatatcaagatttagagcaaagcatgagatgtgtggggatagacagtgaggctgataaaatagagtagagctcagaaacagacccattgatatatgtaagtgacctatgaaaaaaatatggcattttacaatgggaaaatgatggtctttttcttttttagaaaaacagggaaatatatttatatgtaaaaaataaaagggaacccatatgtcataccatacacacaaaaaaattccagtgaattataagtctaaatggagaaggcaaaactttaaatcttttagaaaataatatagaagcatgccatcaagacttcagtgtagagaaaaatttcttatgactcaaagtcctaaccacaaagaaaagattgttaattagattgcatgaatattaagacttatttttaaaattaaaaaaccattaagaaaagtcaggccatagaatgacagaaaatatttgcaacaccccagtaaagagaattgtaatatgcagattataaaaagaagtcttacaaatcagtaaaaaataaaactagacaaaaatttgaacagatgaaagagaaactctaaataatcattacacatgagaaactcaatctcagaaatcagagaactatcattgcatatacactaaattagagaaatattaaaaggctaagtaacatctgtggcttaattaatctagctctagtgatcagcagttcaacctgttgatagtatgtactaagctctcatgtttaatgtactaagctctcatgtttaatgaactaaaccctcatggctaatgtactaagctctcatggctaatgtactaagctctcatgtttcatgtactaagctctcatgtttgaacaataaaattaatataaatcagcaacttaaatagcctctaaggttttaagttttataagaaaaaaaagaatatataaggcttttaaaggttttaaggtttcctaggttatcctcatatgagctcttagaaaaactcatccagcatcaaatgaaactgcaatttattcatatcaggattatcaataccatatttttgaaaaagtcttttctgtaatgaaggagaaaactcacccaggcagttccataggatggcaagatcctggtatctgtctgcaattccaactcttccaacatcaatacaacctattaatttcccctcatcaaaaataaggttatcaagtgagaaatcaccatgagtgaccactgaatctggtgagaatggcaaaagattatgcatttctttccagacttgttcaacaggccagccatttctctcatcatcaaaatcactggcatcaaccaaaccattattcattcttgattgggcctgagccagtctaaatactctatcagagttaaaaggacaattacaaacaggaatggaatgcaatcttctcaggaacactgccagggcatcaacaatattttcacctgaatcaggatattcttccaatacctggaatgctgttttccctgggatggcagtggtgagtaaccatgcatcatcaggagttctgataaaatgcttgatggttggaagaggcataaattcagtcagccagtttagtctgaccatctcatctgtaacatcattggcaacagaacctttgccatgtttcagaaacaactctggggcatctggcttcccatacaatctatagattgtggcacctgattgcccaacattatctctagcccatttatacccatataaatcagcatccatgttggaatttaatcttggcctggagcaagaggtttctctttgaatatggctcatacatgtgcacctcctatagtgagttgtattatactatgcagatatactatgccaatgtttaattgtcag

SEQ ID NO: 13 - DNA, 5575 bp, synthetic construct
  source 1..5575: mol_type = other DNA; note = Synthetic
cactatgtgttaattaaaattatctctaaggcatgtgaactggctgtcttggttttcatctgtacttcatctgctacctctgtgacctgaaacatatttataattccattaagctgtgcatatgatagatttatcatatgtattttccttaaaggatttttgtaagaactaattgaattgatacctgtaaagtctttatcacactacccaataaataataaatctctttgttcagctctctgtttctataaatatgtaccagttttattgtttttagtggtagtgattttattctctttctatatatatacacacacatgtgtgcattcataaatatatacaatttttatgaataaaaaattattagcaatcaatattgaaaaccactgatttttgtttatgtgagcaaacagcagattaaaaggaatttgaattctcatagctagcaggagtcaatgggaaaaacccattggagccaagtacactgactcaatagggactttccattgggttttgcccagtacataaggtcaatagggggtgagtcaacaggaaagtcccattggagccaagtacattgagtcaatagggactttccaatgggttttgcccagtacataaggtcaatgggaggtaagccaatgggtttttcccattactgacatgtatactgagtcattagggactttccaatgggttttgcccagtacataaggtcaataggggtgaatcaacaggaaagtcccattggagccaagtacactgagtcaatagggactttccattgggttttgcccagtacaaaaggtcaatagggggtgagtcaatgggtttttcccattattggcacatacataaggtcaataggggtgactagtggagaagagcatgcttgagggctgagtgcccctcagtgggcagagagcacatggcccacagtccctgagaagttggggggaggggtgggcaattgaactggtgcctagagaaggtggggcttgggtaaactgggaaagtgatgtggtgtactggctccacctttttccccagggtgggggagaaccatatataagtgcagtagtctctgtgaacattcaagcttctgccttctccctcctgtgagtttggtaagtcactgactgtctatgcctgggaaagggtgggcaggagatggggcagtgcaggaaaagtggcactatgaaccctgcagccctagacaattgtactaaccttcttctctttcctctcctgacaggttggtaaccaagccaccatgggatggtccctgatcctgctgtttctggtggctgtggccaccagagtgctgtctcaggttcagctggtgcagtctggggctgaagtgaagaaacctggggcctctgtgaaggtgtcctgcaaggcttctggctacacattcacaggctactacatgcactgggtcagacaggcccctggacagggacttgagtggatgggcagaatcaaccccaacagtggtggcaccaactatgcccagaaattccagggcagagtgaccatgaccagagacaccagcatcagcacagcctacatggaactgagcaggcttaggagtgatgacactgctgtgtactactgtgccagagtgccctactgcagcagcacctcttgtcacagagactggtactttgacctgtggggcagaggcaccctggtcacagttagctctgccagcacaaagggcccctctgtgtttcctctggctcccagcagcaagagcaccagtggtggaacagctgccctgggctgtctggtcaaggactactttcctgagcctgtgacagtgtcctggaactctggggctctgacatctggggtgcacacattccctgctgtgctgcagtcctctggcctgtacagcctgtcctctgtggtcactgtgcctagctctagcctgggcacccagacctacatctgcaatgtgaaccacaagcctagcaacaccaaggtggacaagaaggctgagcccaagagctgtgataagacccacacctgtcctccatgtcctgctccagagctgcttggaggaccatcagtgtttctgttccctccaaagcctaaggacaccctgatgatcagcagaacccctgaagtgacctgtgtggtggtggatgtgtcccatgaggacccagaagtgaagttcaattggtatgtggatggtgttgaggtgcacaatgccaagaccaagcctagagaggaacagtacaacagcacctacagagtggtgtctgtgctgacagtgctgcaccaggactggctgaatggcaaagagtacaagtgcaaggtgtccaacaaggccctgcctgctcctattgaaaagaccatcagcaaggccaagggccagcctagggaaccccaagtgtataccctgcctcctagcagagatgagctgaccaagaaccaggtgtccctgacatgcctggttaagggcttctacccctctgacattgctgtggaatgggagagcaatggccagcctgagaacaactacaagaccacacctcctgtgctggactctgatggctcattcttcctgtactccaagctgactgtggacaagtccagatggcagcaaggcaatgtgttcagctgctctgtgatgcatgaggccctgcacaaccactacacacagaagtctctgtctctgagccctggcaagagaaagagaaggagtggctctggggccaccaacttcagcctgctgaaacaggctggggatgttgaagagaaccctggacctatggacttccaggtgcagatcatcagctttctgcttatctctgccagtgtgatcatgagcaggggagacatccagatgacacagagccctctgagcctgccagtgacacctggggaacctgccagcatctcttgcagaagctctcagagcctcctggattctgatgatggcaacacctacctggactggtatctgcagaagcctggccagtctcctcagctgctgatctacaccctgagctacagagccagtggggtgccagacagattctctggctctggatctggcactgacttcacactgaagattagcagagtggaagctgaggatgtgggagtctactactgtatgcagaggattgagttccctctgacttttggtggtggtacaaaggtggaaatcaagaggacagtggctgctccttctgtgttcatcttcccaccatctgatgagcagctcaagagtggcacagcctctgttgtgtgtctgctgaacaacttctaccctagggaagccaaggtgcagtggaaagtggacaatgccctccagtctggcaacagccaagagagtgtgacagaacaggacagcaaggactccacctacagcctgagcagcaccctgacactgagcaaggctgactatgagaagcacaaagtctatgcctgtgaagtgacacaccagggactgagcagccctgtgaccaagagcttcaacaggggagagtgcagctgaagatctacttctggctaataaaagatcagagctctagtgatctgtgtgttggttttttgtgtctgcattctagcaagtcaatatgttcaccccaaaaaagctgtttgttaacttgtcaacctcattctaaaatgtatatagaagcccaaaagacaataacaaaaatattcttgtagaacaaaatgggaaagaatgttccactaaatatcaagatttagagcaaagcatgagatgtgtggggatagacagtgaggctgataaaatagagtagagctcagaaacagacccattgatatatgtaagtgacctatgaaaaaaatatggcattttacaatgggaaaatgatggtctttttcttttttagaaaaacagggaaatatatttatatgtaaaaaataaaagggaacccatatgtcataccatacacacaaaaaaattccagtgaattataagtctaaatggagaaggcaaaactttaaatcttttagaaaataatatagaagcatgccatcaagacttcagtgtagagaaaaatttcttatgactcaaagtcctaaccacaaagaaaagattgttaattagattgcatgaatattaagacttatttttaaaattaaaaaaccattaagaaaagtcaggccatagaatgacagaaaatatttgcaacaccccagtaaagagaattgtaatatgcagattataaaaagaagtcttacaaatcagtaaaaaataaaactagacaaaaatttgaacagatgaaagagaaactctaaataatcattacacatgagaaactcaatctcagaaatcagagaactatcattgcatatacactaaattagagaaatattaaaaggctaagtaacatctgtggcttaattaatctagctctagtgatcagcagttcaacctgttgatagtatgtactaagctctcatgtttaatgtactaagctctcatgtttaatgaactaaaccctcatggctaatgtactaagctctcatggctaatgtactaagctctcatgtttcatgtactaagctctcatgtttgaacaataaaattaatataaatcagcaacttaaatagcctctaaggttttaagttttataagaaaaaaaagaatatataaggcttttaaaggttttaaggtttcctaggttatcctcatatgagctcttagaaaaactcatccagcatcaaatgaaactgcaatttattcatatcaggattatcaataccatatttttgaaaaagtcttttctgtaatgaaggagaaaactcacccaggcagttccataggatggcaagatcctggtatctgtctgcaattccaactcttccaacatcaatacaacctattaatttcccctcatcaaaaataaggttatcaagtgagaaatcaccatgagtgaccactgaatctggtgagaatggcaaaagattatgcatttctttccagacttgttcaacaggccagccatttctctcatcatcaaaatcactggcatcaaccaaaccattattcattcttgattgggcctgagccagtctaaatactctatcagagttaaaaggacaattacaaacaggaatggaatgcaatcttctcaggaacactgccagggcatcaacaatattttcacctgaatcaggatattcttccaatacctggaatgctgttttccctgggatggcagtggtgagtaaccatgcatcatcaggagttctgataaaatgcttgatggttggaagaggcataaattcagtcagccagtttagtctgaccatctcatctgtaacatcattggcaacagaacctttgccatgtttcagaaacaactctggggcatctggcttcccatacaatctatagattgtggcacctgattgcccaacattatctctagcccatttatacccatataaatcagcatccatgttggaatttaatcttggcctggagcaagaggtttctctttgaatatggctcatacatgtgcacctcctatagtgagttgtattatactatgcagatatactatgccaatgtttaattgtcag

SEQ ID NO: 14 - DNA, 9777 bp, synthetic construct
  source 1..9777: mol_type = other DNA; note = Synthetic
cactatgtgttaattaaaattatctctaaggcatgtgaactggctgtcttggttttcatctgtacttcatctgctacctctgtgacctgaaacatatttataattccattaagctgtgcatatgatagatttatcatatgtattttccttaaaggatttttgtaagaactaattgaattgatacctgtaaagtctttatcacactacccaataaataataaatctctttgttcagctctctgtttctataaatatgtaccagttttattgtttttagtggtagtgattttattctctttctatatatatacacacacatgtgtgcattcataaatatatacaatttttatgaataaaaaattattagcaatcaatattgaaaaccactgatttttgtttatgtgagcaaacagcagattaaaaggaatttgaattctcatagctagcaggagtcaatgggaaaaacccattggagccaagtacactgactcaatagggactttccattgggttttgcccagtacataaggtcaatagggggtgagtcaacaggaaagtcccattggagccaagtacattgagtcaatagggactttccaatgggttttgcccagtacataaggtcaatgggaggtaagccaatgggtttttcccattactgacatgtatactgagtcattagggactttccaatgggttttgcccagtacataaggtcaataggggtgaatcaacaggaaagtcccattggagccaagtacactgagtcaatagggactttccattgggttttgcccagtacaaaaggtcaatagggggtgagtcaatgggtttttcccattattggcacatacataaggtcaataggggtgactagtggagaagagcatgcttgagggctgagtgcccctcagtgggcagagagcacatggcccacagtccctgagaagttggggggaggggtgggcaattgaactggtgcctagagaaggtggggcttgggtaaactgggaaagtgatgtggtgtactggctccacctttttccccagggtgggggagaaccatatataagtgcagtagtctctgtgaacattcaagcttctgccttctccctcctgtgagtttggtaagtcactgactgtctatgcctgggaaagggtgggcaggagatggggcagtgcaggaaaagtggcactatgaaccctgcagccctagacaattgtactaaccttcttctctttcctctcctgacaggttggtaaccaagccaccatgggatggtccctgatcctgctgtttctggtggctgtggccaccagagtgctgtctcaggttcagctggtgcagtctggggctgaagtgaagaaacctggggcctctgtgaaggtgtcctgcaaggcttctggctacacattcacaggctactacatgcactgggtcagacaggcccctggacagggacttgagtggatgggcagaatcaaccccaacagtggtggcaccaactatgcccagaaattccagggcagagtgaccatgaccagagacaccagcatcagcacagcctacatggaactgagcaggcttaggagtgatgacactgctgtgtactactgtgccagagtgccctactgcagcagcacctcttgtcacagagactggtactttgacctgtggggcagaggcaccctggtcacagttagctctgccagcacaaagggcccctctgtgtttcctctggctcccagcagcaagagcaccagtggtggaacagctgccctgggctgtctggtcaaggactactttcctgagcctgtgacagtgtcctggaactctggggctctgacatctggggtgcacacattccctgctgtgctgcagtcctctggcctgtacagcctgtcctctgtggtcactgtgcctagctctagcctgggcacccagacctacatctgcaatgtgaaccacaagcctagcaacaccaaggtggacaagaaggctgagcccaagagctgtgataagacccacacctgtcctccatgtcctgctccagagctgcttggaggaccatcagtgtttctgttccctccaaagcctaaggacaccctgatgatcagcagaacccctgaagtgacctgtgtggtggtggatgtgtcccatgaggacccagaagtgaagttcaattggtatgtggatggtgttgaggtgcacaatgccaagaccaagcctagagaggaacagtacaacagcacctacagagtggtgtctgtgctgacagtgctgcaccaggactggctgaatggcaaagagtacaagtgcaaggtgtccaacaaggccctgcctgctcctattgaaaagaccatcagcaaggccaagggccagcctagggaaccccaagtgtataccctgcctcctagcagagatgagctgaccaagaaccaggtgtccctgacatgcctggttaagggcttctacccctctgacattgctgtggaatgggagagcaatggccagcctgagaacaactacaagaccacacctcctgtgctggactctgatggctcattcttcctgtactccaagctgactgtggacaagtccagatggcagcaaggcaatgtgttcagctgctctgtgatgcatgaggccctgcacaaccactacacacagaagtctctgtctctgagccctggcaagagaaagagaaggagtggctctggggccaccaacttcagcctgctgaaacaggctggggatgttgaagagaaccctggacctatggacttccaggtgcagatcatcagctttctgcttatctctgccagtgtgatcatgagcaggggagacatccagatgacacagagccctctgagcctgccagtgacacctggggaacctgccagcatctcttgcagaagctctcagagcctcctggattctgatgatggcaacacctacctggactggtatctgcagaagcctggccagtctcctcagctgctgatctacaccctgagctacagagccagtggggtgccagacagattctctggctctggatctggcactgacttcacactgaagattagcagagtggaagctgaggatgtgggagtctactactgtatgcagaggattgagttccctctgacttttggtggtggtacaaaggtggaaatcaagaggacagtggctgctccttctgtgttcatcttcccaccatctgatgagcagctcaagagtggcacagcctctgttgtgtgtctgctgaacaacttctaccctagggaagccaaggtgcagtggaaagtggacaatgccctccagtctggcaacagccaagagagtgtgacagaacaggacagcaaggactccacctacagcctgagcagcaccctgacactgagcaaggctgactatgagaagcacaaagtctatgcctgtgaagtgacacaccagggactgagcagccctgtgaccaagagcttcaacaggggagagtgcagctgaagatctacttctggctaataaaagatcagagctctagtgatctgtgtgttggttttttgtgtctgcattctagcagagccccactgtgttcatcttacagatggaaatactgacattcagaggagttagttaacttgcctaggtgattcagctaataagtgcaagaaagatttcaatccaaggtgatttgattctgaagcctgtgctaatcacattacaccaagctacaacttcatttataaataataagtcagctttcaagggcctttcaggtgtcctgcacttctacaagctgtgccatttagtgaacacaaaatgagccttctgatgaagtagtcttttcattatttcagatattagaacactaaaattcttagctgccagctgattgaaggctgggacaaaattcaaacatgcatctacaacaatatatatctcaatgttagtctccaaattctattgacttcaactcaagagaatataaagagctagtctttatacactctttaaggtatgatatcatctggaaagtaacaaaattgatgcaaatttgaatgaactttatcatggtgtatttacacaatgtgtttcttctccctgcaatgtatttctttctctaattccttccatttgatctttcatacacaatctggttctgatgtatgttttttggatgcacttttcaactccaaaagacagagctagttactttcttcctggtgctccaagcactgtatttgtatctgtattcaagccctttgcaatattgtactggatcattatttcacctctaggatggcttccccaggcaacttgtgttcacccagagactacattttgtatcttgttgacctttgaacttccaccagtgtctaaaaataatatgtatgcaaaattacttgctatgagaatgtataattaaacaatataaaaaggagaagcaaggagagaaacacaggtgtgtatttgtgtttgtgtgcttaaaaggcagtgtggaaaaggaagaaatgccatttatagtgaggagacaaagttatattacctcttatctggcttttaaggagattttgctgagctaaaaatcctatattcatagaaaagccttacctgagttgccaatacctcaattcagtctagcaggagtcaatgggaaaaacccattggagccaagtacactgactcaatagggactttccattgggttttgcccagtacataaggtcaatagggggtgagtcaacaggaaagtcccattggagccaagtacattgagtcaatagggactttccaatgggttttgcccagtacataaggtcaatgggaggtaagccaatgggtttttcccattactgacatgtatactgagtcattagggactttccaatgggttttgcccagtacataaggtcaataggggtgaatcaacaggaaagtcccattggagccaagtacactgagtcaatagggactttccattgggttttgcccagtacaaaaggtcaatagggggtgagtcaatgggtttttcccattattggcacatacataaggtcaataggggtgactagtggagaagagcatgcttgagggctgagtgcccctcagtgggcagagagcacatggcccacagtccctgagaagttggggggaggggtgggcaattgaactggtgcctagagaaggtggggcttgggtaaactgggaaagtgatgtggtgtactggctccacctttttccccagggtgggggagaaccatatataagtgcagtagtctctgtgaacattcaagcttctgccttctccctcctgtgagtttggtaagtcactgactgtctatgcctgggaaagggtgggcaggagatggggcagtgcaggaaaagtggcactatgaaccctgcagccctagacaattgtactaaccttcttctctttcctctcctgacaggttggtaaccaagccaccatgggatggtccctgatcctgctgtttctggtggctgtggccaccagagtgctgtctcaggttcagctggtgcagtctggggctgaagtgaagaaacctggggcctctgtgaaggtgtcctgcaaggcttctggctacacattcacaggctactacatgcactgggtcagacaggcccctggacagggacttgagtggatgggcagaatcaaccccaacagtggtggcaccaactatgcccagaaattccagggcagagtgaccatgaccagagacaccagcatcagcacagcctacatggaactgagcaggcttaggagtgatgacactgctgtgtactactgtgccagagtgccctactgcagcagcacctcttgtcacagagactggtactttgacctgtggggcagaggcaccctggtcacagttagctctgccagcacaaagggcccctctgtgtttcctctggctcccagcagcaagagcaccagtggtggaacagctgccctgggctgtctggtcaaggactactttcctgagcctgtgacagtgtcctggaactctggggctctgacatctggggtgcacacattccctgctgtgctgcagtcctctggcctgtacagcctgtcctctgtggtcactgtgcctagctctagcctgggcacccagacctacatctgcaatgtgaaccacaagcctagcaacaccaaggtggacaagaaggctgagcccaagagctgtgataagacccacacctgtcctccatgtcctgctccagagctgcttggaggaccatcagtgtttctgttccctccaaagcctaaggacaccctgatgatcagcagaacccctgaagtgacctgtgtggtggtggatgtgtcccatgaggacccagaagtgaagttcaattggtatgtggatggtgttgaggtgcacaatgccaagaccaagcctagagaggaacagtacaacagcacctacagagtggtgtctgtgctgacagtgctgcaccaggactggctgaatggcaaagagtacaagtgcaaggtgtccaacaaggccctgcctgctcctattgaaaagaccatcagcaaggccaagggccagcctagggaaccccaagtgtataccctgcctcctagcagagatgagctgaccaagaaccaggtgtccctgacatgcctggttaagggcttctacccctctgacattgctgtggaatgggagagcaatggccagcctgagaacaactacaagaccacacctcctgtgctggactctgatggctcattcttcctgtactccaagctgactgtggacaagtccagatggcagcaaggcaatgtgttcagctgctctgtgatgcatgaggccctgcacaaccactacacacagaagtctctgtctctgagccctggcaagagaaagagaaggagtggctctggggccaccaacttcagcctgctgaaacaggctggggatgttgaagagaaccctggacctatggacttccaggtgcagatcatcagctttctgcttatctctgccagtgtgatcatgagcaggggagacatccagatgacacagagccctctgagcctgccagtgacacctggggaacctgccagcatctcttgcagaagctctcagagcctcctggattctgatgatggcaacacctacctggactggtatctgcagaagcctggccagtctcctcagctgctgatctacaccctgagctacagagccagtggggtgccagacagattctctggctctggatctggcactgacttcacactgaagattagcagagtggaagctgaggatgtgggagtctactactgtatgcagaggattgagttccctctgacttttggtggtggtacaaaggtggaaatcaagaggacagtggctgctccttctgtgttcatcttcccaccatctgatgagcagctcaagagtggcacagcctctgttgtgtgtctgctgaacaacttctaccctagggaagccaaggtgcagtggaaagtggacaatgccctccagtctggcaacagccaagagagtgtgacagaacaggacagcaaggactccacctacagcctgagcagcaccctgacactgagcaaggctgactatgagaagcacaaagtctatgcctgtgaagtgacacaccagggactgagcagccctgtgaccaagagcttcaacaggggagagtgcagctgaagatctacttctggctaataaaagatcagagctctagtgatctgtgtgttggttttttgtgtctgcattctagcaagtcaatatgttcaccccaaaaaagctgtttgttaacttgtcaacctcattctaaaatgtatatagaagcccaaaagacaataacaaaaatattcttgtagaacaaaatgggaaagaatgttccactaaatatcaagatttagagcaaagcatgagatgtgtggggatagacagtgaggctgataaaatagagtagagctcagaaacagacccattgatatatgtaagtgacctatgaaaaaaatatggcattttacaatgggaaaatgatggtctttttcttttttagaaaaacagggaaatatatttatatgtaaaaaataaaagggaacccatatgtcataccatacacacaaaaaaattccagtgaattataagtctaaatggagaaggcaaaactttaaatcttttagaaaataatatagaagcatgccatcaagacttcagtgtagagaaaaatttcttatgactcaaagtcctaaccacaaagaaaagattgttaattagattgcatgaatattaagacttatttttaaaattaaaaaaccattaagaaaagtcaggccatagaatgacagaaaatatttgcaacaccccagtaaagagaattgtaatatgcagattataaaaagaagtcttacaaatcagtaaaaaataaaactagacaaaaatttgaacagatgaaagagaaactctaaataatcattacacatgagaaactcaatctcagaaatcagagaactatcattgcatatacactaaattagagaaatattaaaaggctaagtaacatctgtggcttaattaatctagctctagtgatcagcagttcaacctgttgatagtatgtactaagctctcatgtttaatgtactaagctctcatgtttaatgaactaaaccctcatggctaatgtactaagctctcatggctaatgtactaagctctcatgtttcatgtactaagctctcatgtttgaacaataaaattaatataaatcagcaacttaaatagcctctaaggttttaagttttataagaaaaaaaagaatatataaggcttttaaaggttttaaggtttcctaggttatcctcatatgagctcttagaaaaactcatccagcatcaaatgaaactgcaatttattcatatcaggattatcaataccatatttttgaaaaagtcttttctgtaatgaaggagaaaactcacccaggcagttccataggatggcaagatcctggtatctgtctgcaattccaactcttccaacatcaatacaacctattaatttcccctcatcaaaaataaggttatcaagtgagaaatcaccatgagtgaccactgaatctggtgagaatggcaaaagattatgcatttctttccagacttgttcaacaggccagccatttctctcatcatcaaaatcactggcatcaaccaaaccattattcattcttgattgggcctgagccagtctaaatactctatcagagttaaaaggacaattacaaacaggaatggaatgcaatcttctcaggaacactgccagggcatcaacaatattttcacctgaatcaggatattcttccaatacctggaatgctgttttccctgggatggcagtggtgagtaaccatgcatcatcaggagttctgataaaatgcttgatggttggaagaggcataaattcagtcagccagtttagtctgaccatctcatctgtaacatcattggcaacagaacctttgccatgtttcagaaacaactctggggcatctggcttcccatacaatctatagattgtggcacctgattgcccaacattatctctagcccatttatacccatataaatcagcatccatgttggaatttaatcttggcctggagcaagaggtttctctttgaatatggctcatacatgtgcacctcctatagtgagttgtattatactatgcagatatactatgccaatgtttaattgtcag

SEQ ID NO: 15 - DNA, 5584 bp, synthetic construct
  source 1..5584: mol_type = other DNA; note = Synthetic
cactatgtgttaattaaaattatctctaaggcatgtgaactggctgtcttggttttcatctgtacttcatctgctacctctgtgacctgaaacatatttataattccattaagctgtgcatatgatagatttatcatatgtattttccttaaaggatttttgtaagaactaattgaattgatacctgtaaagtctttatcacactacccaataaataataaatctctttgttcagctctctgtttctataaatatgtaccagttttattgtttttagtggtagtgattttattctctttctatatatatacacacacatgtgtgcattcataaatatatacaatttttatgaataaaaaattattagcaatcaatattgaaaaccactgatttttgtttatgtgagcaaacagcagattaaaaggaatttgaattctcatagctagcaggagtcaatgggaaaaacccattggagccaagtacactgactcaatagggactttccattgggttttgcccagtacataaggtcaatagggggtgagtcaacaggaaagtcccattggagccaagtacattgagtcaatagggactttccaatgggttttgcccagtacataaggtcaatgggaggtaagccaatgggtttttcccattactgacatgtatactgagtcattagggactttccaatgggttttgcccagtacataaggtcaataggggtgaatcaacaggaaagtcccattggagccaagtacactgagtcaatagggactttccattgggttttgcccagtacaaaaggtcaatagggggtgagtcaatgggtttttcccattattggcacatacataaggtcaataggggtgactagtggagaagagcatgcttgagggctgagtgcccctcagtgggcagagagcacatggcccacagtccctgagaagttggggggaggggtgggcaattgaactggtgcctagagaaggtggggcttgggtaaactgggaaagtgatgtggtgtactggctccacctttttccccagggtgggggagaaccatatataagtgcagtagtctctgtgaacattcaagcttctgccttctccctcctgtgagtttggtaagtcactgactgtctatgcctgggaaagggtgggcaggagatggggcagtgcaggaaaagtggcactatgaaccctgcagccctagacaattgtactaaccttcttctctttcctctcctgacaggttggtaaccaagccaccatgaactttggcctgagcctgatcttcctggtgctgatcctgaaaggggtgcagtgtgaagtgcagctggtggaatctggggctgaagtgaagaaacctggggcctctgtgaaggtgtcctgcaaagtgtctggctacaccctgacagagctgagcatgcactgggtcagacaggcccctggcaaaggccttgaatggatgggaggctttgaccctgaggatggggagactatgtatgcccagaaattccagggcagagtgaccatgacagaggacaccagcacagacacagcctacatggaactgagcagccttaggagtgaagatacagctgtgtactactgtgccaccagcactgctgtggctggcacccctgacctgtttgactactactatggcatggatgtgtggggccagggcaccacagtgacagtcagctctgcttccacaaagggcccctctgtgttccctctggctcctagcagcaagagcaccagtggtggaacagctgccctgggctgtctggtcaaggactactttcctgagccagtgactgtgtcctggaacagtggggctctgacatctggggtgcacacattccctgctgtgctccagtcctctggcctgtacagcctctcctctgtggtcactgtgccaagctctagcctgggcacccagacctacatctgcaatgtgaaccacaagcctagcaacaccaaggtggacaagaaggctgagcccaagagctgtgacaagacccacacctgtcctccatgtcctgctccagagctgcttggaggaccttctgtgtttctgttccctccaaagcctaaggacaccctgatgatcagcagaacccctgaagtgacctgtgtggtggtggatgtgtcccatgaggacccagaagtgaagttcaattggtatgtggatggtgttgaggtgcacaatgccaagaccaagcctagagaggaacagtacaacagcacctacagagtggtgtcagtgctgacagtgctgcaccaggactggctgaatggcaaagagtacaagtgcaaggtgtccaacaaggccctgcctgctcctattgaaaagaccatcagcaaggccaagggccagcctagggaaccccaagtgtataccctgccacctagcagagatgagctgaccaagaaccaggtgtccctgacatgcctggttaagggcttctacccctctgacattgctgtggaatgggagagcaatggccagcctgagaacaactacaagacaacccctcctgtgctggactctgatggctcattcttcctgtactccaagctcacagtggacaagtccagatggcagcaaggcaatgtgttcagctgctctgtgatgcatgaggccctgcacaaccactacacacagaagtccctgtctctgagccctggcaagagaaagagaaggagtggctctggggccaccaacttcagcctgctgaaacaggctggggatgttgaagagaaccctggacctatggcctgggctctgctgctgctgggactgctgtctcactgcacaggctctgtgacagagattgtgatgacacagagccctctgtctagccctgtgacactgggacagcctgccagcatcagctgtagaagctctcagagtctggtgcattctgatggcaacacctacctgagctggctgcaacagaggcctggacagccacctagactgctgatctacaagatcagcaacaggttctctggggtcccagacagattctctggaagtggtgctggcacagacttcactctgaagattagcagagtggaagctgaggatgttggggtgtactattgcacccaggccacacagttcccttacacctttggccagggaacaaaagtggacatcaagggcaccaaactgactgtgctgggccagccaaaggctgccccttctgtgactctgtttccacctagctctgaggaactccaggctaacaaggccacacttgtgtgcctgatctctgacttctaccctggggctgtgacagtggcctggaaggctgatagcagcccagtgaaggctggggttgagacaaccacacctagcaagcagagcaacaacaaatatgctgccagcagctacctgagtctgacccctgagcagtggaagtcccacagatcctacagctgccaagtgacccatgagggctctacagtggaaaagactgtggccccaacagagtgcagctgaagatctacttctggctaataaaagatcagagctctagtgatctgtgtgttggttttttgtgtctgcattctagcaagtcaatatgttcaccccaaaaaagctgtttgttaacttgtcaacctcattctaaaatgtatatagaagcccaaaagacaataacaaaaatattcttgtagaacaaaatgggaaagaatgttccactaaatatcaagatttagagcaaagcatgagatgtgtggggatagacagtgaggctgataaaatagagtagagctcagaaacagacccattgatatatgtaagtgacctatgaaaaaaatatggcattttacaatgggaaaatgatggtctttttcttttttagaaaaacagggaaatatatttatatgtaaaaaataaaagggaacccatatgtcataccatacacacaaaaaaattccagtgaattataagtctaaatggagaaggcaaaactttaaatcttttagaaaataatatagaagcatgccatcaagacttcagtgtagagaaaaatttcttatgactcaaagtcctaaccacaaagaaaagattgttaattagattgcatgaatattaagacttatttttaaaattaaaaaaccattaagaaaagtcaggccatagaatgacagaaaatatttgcaacaccccagtaaagagaattgtaatatgcagattataaaaagaagtcttacaaatcagtaaaaaataaaactagacaaaaatttgaacagatgaaagagaaactctaaataatcattacacatgagaaactcaatctcagaaatcagagaactatcattgcatatacactaaattagagaaatattaaaaggctaagtaacatctgtggcttaattaatctagctctagtgatcagcagttcaacctgttgatagtatgtactaagctctcatgtttaatgtactaagctctcatgtttaatgaactaaaccctcatggctaatgtactaagctctcatggctaatgtactaagctctcatgtttcatgtactaagctctcatgtttgaacaataaaattaatataaatcagcaacttaaatagcctctaaggttttaagttttataagaaaaaaaagaatatataaggcttttaaaggttttaaggtttcctaggttatcctcatatgagctcttagaaaaactcatccagcatcaaatgaaactgcaatttattcatatcaggattatcaataccatatttttgaaaaagtcttttctgtaatgaaggagaaaactcacccaggcagttccataggatggcaagatcctggtatctgtctgcaattccaactcttccaacatcaatacaacctattaatttcccctcatcaaaaataaggttatcaagtgagaaatcaccatgagtgaccactgaatctggtgagaatggcaaaagattatgcatttctttccagacttgttcaacaggccagccatttctctcatcatcaaaatcactggcatcaaccaaaccattattcattcttgattgggcctgagccagtctaaatactctatcagagttaaaaggacaattacaaacaggaatggaatgcaatcttctcaggaacactgccagggcatcaacaatattttcacctgaatcaggatattcttccaatacctggaatgctgttttccctgggatggcagtggtgagtaaccatgcatcatcaggagttctgataaaatgcttgatggttggaagaggcataaattcagtcagccagtttagtctgaccatctcatctgtaacatcattggcaacagaacctttgccatgtttcagaaacaactctggggcatctggcttcccatacaatctatagattgtggcacctgattgcccaacattatctctagcccatttatacccatataaatcagcatccatgttggaatttaatcttggcctggagcaagaggtttctctttgaatatggctcatacatgtgcacctcctatagtgagttgtattatactatgcagatatactatgccaatgtttaattgtcag

SEQ ID NO: 16 - DNA, 9795 bp, synthetic construct
  source 1..9795: mol_type = other DNA; note = Synthetic
cactatgtgttaattaaaattatctctaaggcatgtgaactggctgtcttggttttcatctgtacttcatctgctacctctgtgacctgaaacatatttataattccattaagctgtgcatatgatagatttatcatatgtattttccttaaaggatttttgtaagaactaattgaattgatacctgtaaagtctttatcacactacccaataaataataaatctctttgttcagctctctgtttctataaatatgtaccagttttattgtttttagtggtagtgattttattctctttctatatatatacacacacatgtgtgcattcataaatatatacaatttttatgaataaaaaattattagcaatcaatattgaaaaccactgatttttgtttatgtgagcaaacagcagattaaaaggaatttgaattctcatagctagcaggagtcaatgggaaaaacccattggagccaagtacactgactcaatagggactttccattgggttttgcccagtacataaggtcaatagggggtgagtcaacaggaaagtcccattggagccaagtacattgagtcaatagggactttccaatgggttttgcccagtacataaggtcaatgggaggtaagccaatgggtttttcccattactgacatgtatactgagtcattagggactttccaatgggttttgcccagtacataaggtcaataggggtgaatcaacaggaaagtcccattggagccaagtacactgagtcaatagggactttccattgggttttgcccagtacaaaaggtcaatagggggtgagtcaatgggtttttcccattattggcacatacataaggtcaataggggtgactagtggagaagagcatgcttgagggctgagtgcccctcagtgggcagagagcacatggcccacagtccctgagaagttggggggaggggtgggcaattgaactggtgcctagagaaggtggggcttgggtaaactgggaaagtgatgtggtgtactggctccacctttttccccagggtgggggagaaccatatataagtgcagtagtctctgtgaacattcaagcttctgccttctccctcctgtgagtttggtaagtcactgactgtctatgcctgggaaagggtgggcaggagatggggcagtgcaggaaaagtggcactatgaaccctgcagccctagacaattgtactaaccttcttctctttcctctcctgacaggttggtaaccaagccaccatgaactttggcctgagcctgatcttcctggtgctgatcctgaaaggggtgcagtgtgaagtgcagctggtggaatctggggctgaagtgaagaaacctggggcctctgtgaaggtgtcctgcaaagtgtctggctacaccctgacagagctgagcatgcactgggtcagacaggcccctggcaaaggccttgaatggatgggaggctttgaccctgaggatggggagactatgtatgcccagaaattccagggcagagtgaccatgacagaggacaccagcacagacacagcctacatggaactgagcagccttaggagtgaagatacagctgtgtactactgtgccaccagcactgctgtggctggcacccctgacctgtttgactactactatggcatggatgtgtggggccagggcaccacagtgacagtcagctctgcttccacaaagggcccctctgtgttccctctggctcctagcagcaagagcaccagtggtggaacagctgccctgggctgtctggtcaaggactactttcctgagccagtgactgtgtcctggaacagtggggctctgacatctggggtgcacacattccctgctgtgctccagtcctctggcctgtacagcctctcctctgtggtcactgtgccaagctctagcctgggcacccagacctacatctgcaatgtgaaccacaagcctagcaacaccaaggtggacaagaaggctgagcccaagagctgtgacaagacccacacctgtcctccatgtcctgctccagagctgcttggaggaccttctgtgtttctgttccctccaaagcctaaggacaccctgatgatcagcagaacccctgaagtgacctgtgtggtggtggatgtgtcccatgaggacccagaagtgaagttcaattggtatgtggatggtgttgaggtgcacaatgccaagaccaagcctagagaggaacagtacaacagcacctacagagtggtgtcagtgctgacagtgctgcaccaggactggctgaatggcaaagagtacaagtgcaaggtgtccaacaaggccctgcctgctcctattgaaaagaccatcagcaaggccaagggccagcctagggaaccccaagtgtataccctgccacctagcagagatgagctgaccaagaaccaggtgtccctgacatgcctggttaagggcttctacccctctgacattgctgtggaatgggagagcaatggccagcctgagaacaactacaagacaacccctcctgtgctggactctgatggctcattcttcctgtactccaagctcacagtggacaagtccagatggcagcaaggcaatgtgttcagctgctctgtgatgcatgaggccctgcacaaccactacacacagaagtccctgtctctgagccctggcaagagaaagagaaggagtggctctggggccaccaacttcagcctgctgaaacaggctggggatgttgaagagaaccctggacctatggcctgggctctgctgctgctgggactgctgtctcactgcacaggctctgtgacagagattgtgatgacacagagccctctgtctagccctgtgacactgggacagcctgccagcatcagctgtagaagctctcagagtctggtgcattctgatggcaacacctacctgagctggctgcaacagaggcctggacagccacctagactgctgatctacaagatcagcaacaggttctctggggtcccagacagattctctggaagtggtgctggcacagacttcactctgaagattagcagagtggaagctgaggatgttggggtgtactattgcacccaggccacacagttcccttacacctttggccagggaacaaaagtggacatcaagggcaccaaactgactgtgctgggccagccaaaggctgccccttctgtgactctgtttccacctagctctgaggaactccaggctaacaaggccacacttgtgtgcctgatctctgacttctaccctggggctgtgacagtggcctggaaggctgatagcagcccagtgaaggctggggttgagacaaccacacctagcaagcagagcaacaacaaatatgctgccagcagctacctgagtctgacccctgagcagtggaagtcccacagatcctacagctgccaagtgacccatgagggctctacagtggaaaagactgtggccccaacagagtgcagctgaagatctacttctggctaataaaagatcagagctctagtgatctgtgtgttggttttttgtgtctgcattctagcagagccccactgtgttcatcttacagatggaaatactgacattcagaggagttagttaacttgcctaggtgattcagctaataagtgcaagaaagatttcaatccaaggtgatttgattctgaagcctgtgctaatcacattacaccaagctacaacttcatttataaataataagtcagctttcaagggcctttcaggtgtcctgcacttctacaagctgtgccatttagtgaacacaaaatgagccttctgatgaagtagtcttttcattatttcagatattagaacactaaaattcttagctgccagctgattgaaggctgggacaaaattcaaacatgcatctacaacaatatatatctcaatgttagtctccaaattctattgacttcaactcaagagaatataaagagctagtctttatacactctttaaggtatgatatcatctggaaagtaacaaaattgatgcaaatttgaatgaactttatcatggtgtatttacacaatgtgtttcttctccctgcaatgtatttctttctctaattccttccatttgatctttcatacacaatctggttctgatgtatgttttttggatgcacttttcaactccaaaagacagagctagttactttcttcctggtgctccaagcactgtatttgtatctgtattcaagccctttgcaatattgtactggatcattatttcacctctaggatggcttccccaggcaacttgtgttcacccagagactacattttgtatcttgttgacctttgaacttccaccagtgtctaaaaataatatgtatgcaaaattacttgctatgagaatgtataattaaacaatataaaaaggagaagcaaggagagaaacacaggtgtgtatttgtgtttgtgtgcttaaaaggcagtgtggaaaaggaagaaatgccatttatagtgaggagacaaagttatattacctcttatctggcttttaaggagattttgctgagctaaaaatcctatattcatagaaaagccttacctgagttgccaatacctcaattcagtctagcaggagtcaatgggaaaaacccattggagccaagtacactgactcaatagggactttccattgggttttgcccagtacataaggtcaatagggggtgagtcaacaggaaagtcccattggagccaagtacattgagtcaatagggactttccaatgggttttgcccagtacataaggtcaatgggaggtaagccaatgggtttttcccattactgacatgtatactgagtcattagggactttccaatgggttttgcccagtacataaggtcaataggggtgaatcaacaggaaagtcccattggagccaagtacactgagtcaatagggactttccattgggttttgcccagtacaaaaggtcaatagggggtgagtcaatgggtttttcccattattggcacatacataaggtcaataggggtgactagtggagaagagcatgcttgagggctgagtgcccctcagtgggcagagagcacatggcccacagtccctgagaagttggggggaggggtgggcaattgaactggtgcctagagaaggtggggcttgggtaaactgggaaagtgatgtggtgtactggctccacctttttccccagggtgggggagaaccatatataagtgcagtagtctctgtgaacattcaagcttctgccttctccctcctgtgagtttggtaagtcactgactgtctatgcctgggaaagggtgggcaggagatggggcagtgcaggaaaagtggcactatgaaccctgcagccctagacaattgtactaaccttcttctctttcctctcctgacaggttggtaaccaagccaccatgaactttggcctgagcctgatcttcctggtgctgatcctgaaaggggtgcagtgtgaagtgcagctggtggaatctggggctgaagtgaagaaacctggggcctctgtgaaggtgtcctgcaaagtgtctggctacaccctgacagagctgagcatgcactgggtcagacaggcccctggcaaaggccttgaatggatgggaggctttgaccctgaggatggggagactatgtatgcccagaaattccagggcagagtgaccatgacagaggacaccagcacagacacagcctacatggaactgagcagccttaggagtgaagatacagctgtgtactactgtgccaccagcactgctgtggctggcacccctgacctgtttgactactactatggcatggatgtgtggggccagggcaccacagtgacagtcagctctgcttccacaaagggcccctctgtgttccctctggctcctagcagcaagagcaccagtggtggaacagctgccctgggctgtctggtcaaggactactttcctgagccagtgactgtgtcctggaacagtggggctctgacatctggggtgcacacattccctgctgtgctccagtcctctggcctgtacagcctctcctctgtggtcactgtgccaagctctagcctgggcacccagacctacatctgcaatgtgaaccacaagcctagcaacaccaaggtggacaagaaggctgagcccaagagctgtgacaagacccacacctgtcctccatgtcctgctccagagctgcttggaggaccttctgtgtttctgttccctccaaagcctaaggacaccctgatgatcagcagaacccctgaagtgacctgtgtggtggtggatgtgtcccatgaggacccagaagtgaagttcaattggtatgtggatggtgttgaggtgcacaatgccaagaccaagcctagagaggaacagtacaacagcacctacagagtggtgtcagtgctgacagtgctgcaccaggactggctgaatggcaaagagtacaagtgcaaggtgtccaacaaggccctgcctgctcctattgaaaagaccatcagcaaggccaagggccagcctagggaaccccaagtgtataccctgccacctagcagagatgagctgaccaagaaccaggtgtccctgacatgcctggttaagggcttctacccctctgacattgctgtggaatgggagagcaatggccagcctgagaacaactacaagacaacccctcctgtgctggactctgatggctcattcttcctgtactccaagctcacagtggacaagtccagatggcagcaaggcaatgtgttcagctgctctgtgatgcatgaggccctgcacaaccactacacacagaagtccctgtctctgagccctggcaagagaaagagaaggagtggctctggggccaccaacttcagcctgctgaaacaggctggggatgttgaagagaaccctggacctatggcctgggctctgctgctgctgggactgctgtctcactgcacaggctctgtgacagagattgtgatgacacagagccctctgtctagccctgtgacactgggacagcctgccagcatcagctgtagaagctctcagagtctggtgcattctgatggcaacacctacctgagctggctgcaacagaggcctggacagccacctagactgctgatctacaagatcagcaacaggttctctggggtcccagacagattctctggaagtggtgctggcacagacttcactctgaagattagcagagtggaagctgaggatgttggggtgtactattgcacccaggccacacagttcccttacacctttggccagggaacaaaagtggacatcaagggcaccaaactgactgtgctgggccagccaaaggctgccccttctgtgactctgtttccacctagctctgaggaactccaggctaacaaggccacacttgtgtgcctgatctctgacttctaccctggggctgtgacagtggcctggaaggctgatagcagcccagtgaaggctggggttgagacaaccacacctagcaagcagagcaacaacaaatatgctgccagcagctacctgagtctgacccctgagcagtggaagtcccacagatcctacagctgccaagtgacccatgagggctctacagtggaaaagactgtggccccaacagagtgcagctgaagatctacttctggctaataaaagatcagagctctagtgatctgtgtgttggttttttgtgtctgcattctagcaagtcaatatgttcaccccaaaaaagctgtttgttaacttgtcaacctcattctaaaatgtatatagaagcccaaaagacaataacaaaaatattcttgtagaacaaaatgggaaagaatgttccactaaatatcaagatttagagcaaagcatgagatgtgtggggatagacagtgaggctgataaaatagagtagagctcagaaacagacccattgatatatgtaagtgacctatgaaaaaaatatggcattttacaatgggaaaatgatggtctttttcttttttagaaaaacagggaaatatatttatatgtaaaaaataaaagggaacccatatgtcataccatacacacaaaaaaattccagtgaattataagtctaaatggagaaggcaaaactttaaatcttttagaaaataatatagaagcatgccatcaagacttcagtgtagagaaaaatttcttatgactcaaagtcctaaccacaaagaaaagattgttaattagattgcatgaatattaagacttatttttaaaattaaaaaaccattaagaaaagtcaggccatagaatgacagaaaatatttgcaacaccccagtaaagagaattgtaatatgcagattataaaaagaagtcttacaaatcagtaaaaaataaaactagacaaaaatttgaacagatgaaagagaaactctaaataatcattacacatgagaaactcaatctcagaaatcagagaactatcattgcatatacactaaattagagaaatattaaaaggctaagtaacatctgtggcttaattaatctagctctagtgatcagcagttcaacctgttgatagtatgtactaagctctcatgtttaatgtactaagctctcatgtttaatgaactaaaccctcatggctaatgtactaagctctcatggctaatgtactaagctctcatgtttcatgtactaagctctcatgtttgaacaataaaattaatataaatcagcaacttaaatagcctctaaggttttaagttttataagaaaaaaaagaatatataaggcttttaaaggttttaaggtttcctaggttatcctcatatgagctcttagaaaaactcatccagcatcaaatgaaactgcaatttattcatatcaggattatcaataccatatttttgaaaaagtcttttctgtaatgaaggagaaaactcacccaggcagttccataggatggcaagatcctggtatctgtctgcaattccaactcttccaacatcaatacaacctattaatttcccctcatcaaaaataaggttatcaagtgagaaatcaccatgagtgaccactgaatctggtgagaatggcaaaagattatgcatttctttccagacttgttcaacaggccagccatttctctcatcatcaaaatcactggcatcaaccaaaccattattcattcttgattgggcctgagccagtctaaatactctatcagagttaaaaggacaattacaaacaggaatggaatgcaatcttctcaggaacactgccagggcatcaacaatattttcacctgaatcaggatattcttccaatacctggaatgctgttttccctgggatggcagtggtgagtaaccatgcatcatcaggagttctgataaaatgcttgatggttggaagaggcataaattcagtcagccagtttagtctgaccatctcatctgtaacatcattggcaacagaacctttgccatgtttcagaaacaactctggggcatctggcttcccatacaatctatagattgtggcacctgattgcccaacattatctctagcccatttatacccatataaatcagcatccatgttggaatttaatcttggcctggagcaagaggtttctctttgaatatggctcatacatgtgcacctcctatagtgagttgtattatactatgcagatatactatgccaatgtttaattgtcag

SEQ ID NO: 17 - DNA, 8671 bp, synthetic construct
  source 1..8671: mol_type = other DNA; note = Synthetic
cactatgtgttaattaaaattatctctaaggcatgtgaactggctgtcttggttttcatctgtacttcatctgctacctctgtgacctgaaacatatttataattccattaagctgtgcatatgatagatttatcatatgtattttccttaaaggatttttgtaagaactaattgaattgatacctgtaaagtctttatcacactacccaataaataataaatctctttgttcagctctctgtttctataaatatgtaccagttttattgtttttagtggtagtgattttattctctttctatatatatacacacacatgtgtgcattcataaatatatacaatttttatgaataaaaaattattagcaatcaatattgaaaaccactgatttttgtttatgtgagcaaacagcagattaaaaggaatttgaattctcatagctagcaggagtcaatgggaaaaacccattggagccaagtacactgactcaatagggactttccattgggttttgcccagtacataaggtcaatagggggtgagtcaacaggaaagtcccattggagccaagtacattgagtcaatagggactttccaatgggttttgcccagtacataaggtcaatgggaggtaagccaatgggtttttcccattactgacatgtatactgagtcattagggactttccaatgggttttgcccagtacataaggtcaataggggtgaatcaacaggaaagtcccattggagccaagtacactgagtcaatagggactttccattgggttttgcccagtacaaaaggtcaatagggggtgagtcaatgggtttttcccattattggcacatacataaggtcaataggggtgactagtggagaagagcatgcttgagggctgagtgcccctcagtgggcagagagcacatggcccacagtccctgagaagttggggggaggggtgggcaattgaactggtgcctagagaaggtggggcttgggtaaactgggaaagtgatgtggtgtactggctccacctttttccccagggtgggggagaaccatatataagtgcagtagtctctgtgaacattcaagcttctgccttctccctcctgtgagtttggtaagtcactgactgtctatgcctgggaaagggtgggcaggagatggggcagtgcaggaaaagtggcactatgaaccctgcagccctagacaattgtactaaccttcttctctttcctctcctgacaggttggtaaccaagccaccatgaactttggcctgagcctgatcttcctggtgctgatcctgaaaggggtgcagtgtgaagtgcagctggtggaatctggggctgaagtgaagaaacctggggcctctgtgaaggtgtcctgcaaagtgtctggctacaccctgacagagctgagcatgcactgggtcagacaggcccctggcaaaggccttgaatggatgggaggctttgaccctgaggatggggagactatgtatgcccagaaattccagggcagagtgaccatgacagaggacaccagcacagacacagcctacatggaactgagcagccttaggagtgaagatacagctgtgtactactgtgccaccagcactgctgtggctggcacccctgacctgtttgactactactatggcatggatgtgtggggccagggcaccacagtgacagtcagctctgcttccacaaagggcccctctgtgttccctctggctcctagcagcaagagcaccagtggtggaacagctgccctgggctgtctggtcaaggactactttcctgagccagtgactgtgtcctggaacagtggggctctgacatctggggtgcacacattccctgctgtgctccagtcctctggcctgtacagcctctcctctgtggtcactgtgccaagctctagcctgggcacccagacctacatctgcaatgtgaaccacaagcctagcaacaccaaggtggacaagaaggctgagcccaagagctgtgacaagacccacacctgtcctccatgtcctgctccagagctgcttggaggaccttctgtgtttctgttccctccaaagcctaaggacaccctgatgatcagcagaacccctgaagtgacctgtgtggtggtggatgtgtcccatgaggacccagaagtgaagttcaattggtatgtggatggtgttgaggtgcacaatgccaagaccaagcctagagaggaacagtacaacagcacctacagagtggtgtcagtgctgacagtgctgcaccaggactggctgaatggcaaagagtacaagtgcaaggtgtccaacaaggccctgcctgctcctattgaaaagaccatcagcaaggccaagggccagcctagggaaccccaagtgtataccctgccacctagcagagatgagctgaccaagaaccaggtgtccctgacatgcctggttaagggcttctacccctctgacattgctgtggaatgggagagcaatggccagcctgagaacaactacaagacaacccctcctgtgctggactctgatggctcattcttcctgtactccaagctcacagtggacaagtccagatggcagcaaggcaatgtgttcagctgctctgtgatgcatgaggccctgcacaaccactacacacagaagtccctgtctctgagccctggcaagagaaagagaaggagtggctctggggccaccaacttcagcctgctgaaacaggctggggatgttgaagagaaccctggacctatggcctgggctctgctgctgctgggactgctgtctcactgcacaggctctgtgacagagattgtgatgacacagagccctctgtctagccctgtgacactgggacagcctgccagcatcagctgtagaagctctcagagtctggtgcattctgatggcaacacctacctgagctggctgcaacagaggcctggacagccacctagactgctgatctacaagatcagcaacaggttctctggggtcccagacagattctctggaagtggtgctggcacagacttcactctgaagattagcagagtggaagctgaggatgttggggtgtactattgcacccaggccacacagttcccttacacctttggccagggaacaaaagtggacatcaagggcaccaaactgactgtgctgggccagccaaaggctgccccttctgtgactctgtttccacctagctctgaggaactccaggctaacaaggccacacttgtgtgcctgatctctgacttctaccctggggctgtgacagtggcctggaaggctgatagcagcccagtgaaggctggggttgagacaaccacacctagcaagcagagcaacaacaaatatgctgccagcagctacctgagtctgacccctgagcagtggaagtcccacagatcctacagctgccaagtgacccatgagggctctacagtggaaaagactgtggccccaacagagtgcagctgaagatctacttctggctaataaaagatcagagctctagtgatctgtgtgttggttttttgtgtctgcattctagcaggagtcaatgggaaaaacccattggagccaagtacactgactcaatagggactttccattgggttttgcccagtacataaggtcaatagggggtgagtcaacaggaaagtcccattggagccaagtacattgagtcaatagggactttccaatgggttttgcccagtacataaggtcaatgggaggtaagccaatgggtttttcccattactgacatgtatactgagtcattagggactttccaatgggttttgcccagtacataaggtcaataggggtgaatcaacaggaaagtcccattggagccaagtacactgagtcaatagggactttccattgggttttgcccagtacaaaaggtcaatagggggtgagtcaatgggtttttcccattattggcacatacataaggtcaataggggtgactagtggagaagagcatgcttgagggctgagtgcccctcagtgggcagagagcacatggcccacagtccctgagaagttggggggaggggtgggcaattgaactggtgcctagagaaggtggggcttgggtaaactgggaaagtgatgtggtgtactggctccacctttttccccagggtgggggagaaccatatataagtgcagtagtctctgtgaacattcaagcttctgccttctccctcctgtgagtttggtaagtcactgactgtctatgcctgggaaagggtgggcaggagatggggcagtgcaggaaaagtggcactatgaaccctgcagccctagacaattgtactaaccttcttctctttcctctcctgacaggttggtaaccaagccaccatgggatggtccctgatcctgctgtttctggtggctgtggccaccagagtgctgtctgaagtgcagctggtggaaagtggtggtggcctggttcagcctggtggctctctgagactgagctgtgctgcctctggcttcattgtgtccagcaactacatgagctgggtcagacaggcccctggcaaaggactggaatgggtgtcagtgatctacagtggtggcagcacctactatgctgactctgtgaagggcagattcaccatcagcagacacaacagcaagaacaccctgtacctgcagatgaacagcctgagagctgaggacactgctgtgtactactgtgccagagaagcctatggcatggatgtgtggggccagggcacaacagtgactgtgtcctctgccagcacaaagggcccctctgtgtttcctctggctcccagcagcaagagcaccagtggtggaacagctgccctgggctgtctggtcaaggactactttcctgagcctgtgacagtgtcctggaactctggggctctgacatctggggtgcacacattccctgcagtgctgcagtcctctggcctgtacagcctgtcctctgtggtcacagtgcctagctctagcctgggcacccagacctacatctgcaatgtgaaccacaagcctagcaacaccaaggtggacaagaaggctgagcccaagagctgtgacaagacccacacctgtcctccatgtcctgctccagagctgcttggaggaccatcagtgtttctgttccctccaaagcctaaggacaccctgatgatcagcagaacccctgaagtgacctgtgtggtggttgatgtgtcccatgaggacccagaagtgaagttcaattggtatgtggatggtgttgaggtgcacaatgccaagaccaagcctagagaggaacagtacaactccacctacagagtggtttctgtgctgacagtgctccaccaggactggctgaatggcaaagagtacaagtgcaaggtgtccaacaaggccctgcctgctcctattgaaaagaccatctccaaggccaagggccagcctagggaaccccaggtttacacactgccacctagcagggatgagctgaccaagaaccaggtgtccctgacatgcctggttaagggcttctacccctctgacattgctgtggaatgggagagcaatggccagccagagaacaactacaagacaacccctcctgtgctggactctgatggctcattcttcctgtactccaagctgactgtggacaagtccagatggcagcagggcaatgtctttagctgctctgtgatgcatgaggccctgcacaaccactacacacagaagtccctgtctctgagccctggcaagagaaagagaaggagtggctctggggccaccaacttcagcctgctgaaacaggctggggatgttgaagagaaccctggacctatggacttccaggtgcagatcatcagctttctgcttatctctgccagtgtgatcatgagcaggggagacattgtgatgacccagtctccatccttcctgagtgcctctgtgggagacagagtgaccatcacctgtagagccagccagggcatcagctcttacctggcttggtatcagcaaaagcctggcaaggcccctaagctgctgatctatgctgcctccacactgcagtcaggggtgccctccagattttctggctctggatctggcactgagttcaccctgaccatcagctccctgcagcctgaggactttgccacctactactgccagcagctgaacagctaccctccttacacctttggacagggcaccaagctggaaatcaagaggacagtggctgctccttctgtgttcatcttcccaccatcagatgaacagctgaagagtggcacagcctctgttgtgtgcctgctcaacaacttctaccctagagaagccaaggtgcagtggaaagtggacaatgccctccagtctggcaacagccaagaatctgtgactgagcaggactccaaggacagcacatacagcctgagcagcacactgaccctgagcaaggctgactatgagaagcacaaagtctatgcctgtgaagtgacacaccagggcctgtctagcccagtgaccaagtccttcaacaggggagagtgttgaagatctacttctggctaataaaagatcagagctctagtgatctgtgtgttggttttttgtgtctgcattctagcaagtcaatatgttcaccccaaaaaagctgtttgttaacttgtcaacctcattctaaaatgtatatagaagcccaaaagacaataacaaaaatattcttgtagaacaaaatgggaaagaatgttccactaaatatcaagatttagagcaaagcatgagatgtgtggggatagacagtgaggctgataaaatagagtagagctcagaaacagacccattgatatatgtaagtgacctatgaaaaaaatatggcattttacaatgggaaaatgatggtctttttcttttttagaaaaacagggaaatatatttatatgtaaaaaataaaagggaacccatatgtcataccatacacacaaaaaaattccagtgaattataagtctaaatggagaaggcaaaactttaaatcttttagaaaataatatagaagcatgccatcaagacttcagtgtagagaaaaatttcttatgactcaaagtcctaaccacaaagaaaagattgttaattagattgcatgaatattaagacttatttttaaaattaaaaaaccattaagaaaagtcaggccatagaatgacagaaaatatttgcaacaccccagtaaagagaattgtaatatgcagattataaaaagaagtcttacaaatcagtaaaaaataaaactagacaaaaatttgaacagatgaaagagaaactctaaataatcattacacatgagaaactcaatctcagaaatcagagaactatcattgcatatacactaaattagagaaatattaaaaggctaagtaacatctgtggcttaattaatctagctctagtgatcagcagttcaacctgttgatagtatgtactaagctctcatgtttaatgtactaagctctcatgtttaatgaactaaaccctcatggctaatgtactaagctctcatggctaatgtactaagctctcatgtttcatgtactaagctctcatgtttgaacaataaaattaatataaatcagcaacttaaatagcctctaaggttttaagttttataagaaaaaaaagaatatataaggcttttaaaggttttaaggtttcctaggttatcctcatatgagctcttagaaaaactcatccagcatcaaatgaaactgcaatttattcatatcaggattatcaataccatatttttgaaaaagtcttttctgtaatgaaggagaaaactcacccaggcagttccataggatggcaagatcctggtatctgtctgcaattccaactcttccaacatcaatacaacctattaatttcccctcatcaaaaataaggttatcaagtgagaaatcaccatgagtgaccactgaatctggtgagaatggcaaaagattatgcatttctttccagacttgttcaacaggccagccatttctctcatcatcaaaatcactggcatcaaccaaaccattattcattcttgattgggcctgagccagtctaaatactctatcagagttaaaaggacaattacaaacaggaatggaatgcaatcttctcaggaacactgccagggcatcaacaatattttcacctgaatcaggatattcttccaatacctggaatgctgttttccctgggatggcagtggtgagtaaccatgcatcatcaggagttctgataaaatgcttgatggttggaagaggcataaattcagtcagccagtttagtctgaccatctcatctgtaacatcattggcaacagaacctttgccatgtttcagaaacaactctggggcatctggcttcccatacaatctatagattgtggcacctgattgcccaacattatctctagcccatttatacccatataaatcagcatccatgttggaatttaatcttggcctggagcaagaggtttctctttgaatatggctcatacatgtgcacctcctatagtgagttgtattatactatgcagatatactatgccaatgtttaattgtcag

SEQ ID NO: 18 - DNA, 8722 bp, synthetic construct
  source 1..8722: mol_type = other DNA; note = Synthetic
cactatgtgttaattaaaattatctctaaggcatgtgaactggctgtcttggttttcatctgtacttcatctgctacctctgtgacctgaaacatatttataattccattaagctgtgcatatgatagatttatcatatgtattttccttaaaggatttttgtaagaactaattgaattgatacctgtaaagtctttatcacactacccaataaataataaatctctttgttcagctctctgtttctataaatatgtaccagttttattgtttttagtggtagtgattttattctctttctatatatatacacacacatgtgtgcattcataaatatatacaatttttatgaataaaaaattattagcaatcaatattgaaaaccactgatttttgtttatgtgagcaaacagcagattaaaaggaatttgaattctcatagctagcaggagtcaatgggaaaaacccattggagccaagtacactgactcaatagggactttccattgggttttgcccagtacataaggtcaatagggggtgagtcaacaggaaagtcccattggagccaagtacattgagtcaatagggactttccaatgggttttgcccagtacataaggtcaatgggaggtaagccaatgggtttttcccattactgacatgtatactgagtcattagggactttccaatgggttttgcccagtacataaggtcaataggggtgaatcaacaggaaagtcccattggagccaagtacactgagtcaatagggactttccattgggttttgcccagtacaaaaggtcaatagggggtgagtcaatgggtttttcccattattggcacatacataaggtcaataggggtgactagtggagaagagcatgcttgagggctgagtgcccctcagtgggcagagagcacatggcccacagtccctgagaagttggggggaggggtgggcaattgaactggtgcctagagaaggtggggcttgggtaaactgggaaagtgatgtggtgtactggctccacctttttccccagggtgggggagaaccatatataagtgcagtagtctctgtgaacattcaagcttctgccttctccctcctgtgagtttggtaagtcactgactgtctatgcctgggaaagggtgggcaggagatggggcagtgcaggaaaagtggcactatgaaccctgcagccctagacaattgtactaaccttcttctctttcctctcctgacaggttggtaaccaagccaccatgaactttggcctgagcctgatcttcctggtgctgatcctgaaaggggtgcagtgtgaagtgcagctggtggaatctggggctgaagtgaagaaacctggggcctctgtgaaggtgtcctgcaaagtgtctggctacaccctgacagagctgagcatgcactgggtcagacaggcccctggcaaaggccttgaatggatgggaggctttgaccctgaggatggggagactatgtatgcccagaaattccagggcagagtgaccatgacagaggacaccagcacagacacagcctacatggaactgagcagccttaggagtgaagatacagctgtgtactactgtgccaccagcactgctgtggctggcacccctgacctgtttgactactactatggcatggatgtgtggggccagggcaccacagtgacagtcagctctgcttccacaaagggcccctctgtgttccctctggctcctagcagcaagagcaccagtggtggaacagctgccctgggctgtctggtcaaggactactttcctgagccagtgactgtgtcctggaacagtggggctctgacatctggggtgcacacattccctgctgtgctccagtcctctggcctgtacagcctctcctctgtggtcactgtgccaagctctagcctgggcacccagacctacatctgcaatgtgaaccacaagcctagcaacaccaaggtggacaagaaggctgagcccaagagctgtgacaagacccacacctgtcctccatgtcctgctccagagctgcttggaggaccttctgtgtttctgttccctccaaagcctaaggacaccctgatgatcagcagaacccctgaagtgacctgtgtggtggtggatgtgtcccatgaggacccagaagtgaagttcaattggtatgtggatggtgttgaggtgcacaatgccaagaccaagcctagagaggaacagtacaacagcacctacagagtggtgtcagtgctgacagtgctgcaccaggactggctgaatggcaaagagtacaagtgcaaggtgtccaacaaggccctgcctgctcctattgaaaagaccatcagcaaggccaagggccagcctagggaaccccaagtgtataccctgccacctagcagagatgagctgaccaagaaccaggtgtccctgacatgcctggttaagggcttctacccctctgacattgctgtggaatgggagagcaatggccagcctgagaacaactacaagacaacccctcctgtgctggactctgatggctcattcttcctgtactccaagctcacagtggacaagtccagatggcagcaaggcaatgtgttcagctgctctgtgatgcatgaggccctgcacaaccactacacacagaagtccctgtctctgagccctggcaagagaaagagaaggagtggctctggggccaccaacttcagcctgctgaaacaggctggggatgttgaagagaaccctggacctatggcctgggctctgctgctgctgggactgctgtctcactgcacaggctctgtgacagagattgtgatgacacagagccctctgtctagccctgtgacactgggacagcctgccagcatcagctgtagaagctctcagagtctggtgcattctgatggcaacacctacctgagctggctgcaacagaggcctggacagccacctagactgctgatctacaagatcagcaacaggttctctggggtcccagacagattctctggaagtggtgctggcacagacttcactctgaagattagcagagtggaagctgaggatgttggggtgtactattgcacccaggccacacagttcccttacacctttggccagggaacaaaagtggacatcaagggcaccaaactgactgtgctgggccagccaaaggctgccccttctgtgactctgtttccacctagctctgaggaactccaggctaacaaggccacacttgtgtgcctgatctctgacttctaccctggggctgtgacagtggcctggaaggctgatagcagcccagtgaaggctggggttgagacaaccacacctagcaagcagagcaacaacaaatatgctgccagcagctacctgagtctgacccctgagcagtggaagtcccacagatcctacagctgccaagtgacccatgagggctctacagtggaaaagactgtggccccaacagagtgcagctgaagatctacttctggctaataaaagatcagagctctagtgatctgtgtgttggttttttgtgtctgcattctagcaggagtcaatgggaaaaacccattggagccaagtacactgactcaatagggactttccattgggttttgcccagtacataaggtcaatagggggtgagtcaacaggaaagtcccattggagccaagtacattgagtcaatagggactttccaatgggttttgcccagtacataaggtcaatgggaggtaagccaatgggtttttcccattactgacatgtatactgagtcattagggactttccaatgggttttgcccagtacataaggtcaataggggtgaatcaacaggaaagtcccattggagccaagtacactgagtcaatagggactttccattgggttttgcccagtacaaaaggtcaatagggggtgagtcaatgggtttttcccattattggcacatacataaggtcaataggggtgactagtggagaagagcatgcttgagggctgagtgcccctcagtgggcagagagcacatggcccacagtccctgagaagttggggggaggggtgggcaattgaactggtgcctagagaaggtggggcttgggtaaactgggaaagtgatgtggtgtactggctccacctttttccccagggtgggggagaaccatatataagtgcagtagtctctgtgaacattcaagcttctgccttctccctcctgtgagtttggtaagtcactgactgtctatgcctgggaaagggtgggcaggagatggggcagtgcaggaaaagtggcactatgaaccctgcagccctagacaattgtactaaccttcttctctttcctctcctgacaggttggtaaccaagccaccatgggatggtccctgatcctgctgtttctggtggctgtggccaccagagtgctgtctcaggttcagctggtgcagtctggggctgaagtgaagaaacctggggcctctgtgaaggtgtcctgcaaggcttctggctacacattcacaggctactacatgcactgggtcagacaggcccctggacagggacttgagtggatgggcagaatcaaccccaacagtggtggcaccaactatgcccagaaattccagggcagagtgaccatgaccagagacaccagcatcagcacagcctacatggaactgagcaggcttaggagtgatgacactgctgtgtactactgtgccagagtgccctactgcagcagcacctcttgtcacagagactggtactttgacctgtggggcagaggcaccctggtcacagttagctctgccagcacaaagggcccctctgtgtttcctctggctcccagcagcaagagcaccagtggtggaacagctgccctgggctgtctggtcaaggactactttcctgagcctgtgacagtgtcctggaactctggggctctgacatctggggtgcacacattccctgctgtgctgcagtcctctggcctgtacagcctgtcctctgtggtcactgtgcctagctctagcctgggcacccagacctacatctgcaatgtgaaccacaagcctagcaacaccaaggtggacaagaaggctgagcccaagagctgtgataagacccacacctgtcctccatgtcctgctccagagctgcttggaggaccatcagtgtttctgttccctccaaagcctaaggacaccctgatgatcagcagaacccctgaagtgacctgtgtggtggtggatgtgtcccatgaggacccagaagtgaagttcaattggtatgtggatggtgttgaggtgcacaatgccaagaccaagcctagagaggaacagtacaacagcacctacagagtggtgtctgtgctgacagtgctgcaccaggactggctgaatggcaaagagtacaagtgcaaggtgtccaacaaggccctgcctgctcctattgaaaagaccatcagcaaggccaagggccagcctagggaaccccaagtgtataccctgcctcctagcagagatgagctgaccaagaaccaggtgtccctgacatgcctggttaagggcttctacccctctgacattgctgtggaatgggagagcaatggccagcctgagaacaactacaagaccacacctcctgtgctggactctgatggctcattcttcctgtactccaagctgactgtggacaagtccagatggcagcaaggcaatgtgttcagctgctctgtgatgcatgaggccctgcacaaccactacacacagaagtctctgtctctgagccctggcaagagaaagagaaggagtggctctggggccaccaacttcagcctgctgaaacaggctggggatgttgaagagaaccctggacctatggacttccaggtgcagatcatcagctttctgcttatctctgccagtgtgatcatgagcaggggagacatccagatgacacagagccctctgagcctgccagtgacacctggggaacctgccagcatctcttgcagaagctctcagagcctcctggattctgatgatggcaacacctacctggactggtatctgcagaagcctggccagtctcctcagctgctgatctacaccctgagctacagagccagtggggtgccagacagattctctggctctggatctggcactgacttcacactgaagattagcagagtggaagctgaggatgtgggagtctactactgtatgcagaggattgagttccctctgacttttggtggtggtacaaaggtggaaatcaagaggacagtggctgctccttctgtgttcatcttcccaccatctgatgagcagctcaagagtggcacagcctctgttgtgtgtctgctgaacaacttctaccctagggaagccaaggtgcagtggaaagtggacaatgccctccagtctggcaacagccaagagagtgtgacagaacaggacagcaaggactccacctacagcctgagcagcaccctgacactgagcaaggctgactatgagaagcacaaagtctatgcctgtgaagtgacacaccagggactgagcagccctgtgaccaagagcttcaacaggggagagtgcagctgaagatctacttctggctaataaaagatcagagctctagtgatctgtgtgttggttttttgtgtctgcattctagcaagtcaatatgttcaccccaaaaaagctgtttgttaacttgtcaacctcattctaaaatgtatatagaagcccaaaagacaataacaaaaatattcttgtagaacaaaatgggaaagaatgttccactaaatatcaagatttagagcaaagcatgagatgtgtggggatagacagtgaggctgataaaatagagtagagctcagaaacagacccattgatatatgtaagtgacctatgaaaaaaatatggcattttacaatgggaaaatgatggtctttttcttttttagaaaaacagggaaatatatttatatgtaaaaaataaaagggaacccatatgtcataccatacacacaaaaaaattccagtgaattataagtctaaatggagaaggcaaaactttaaatcttttagaaaataatatagaagcatgccatcaagacttcagtgtagagaaaaatttcttatgactcaaagtcctaaccacaaagaaaagattgttaattagattgcatgaatattaagacttatttttaaaattaaaaaaccattaagaaaagtcaggccatagaatgacagaaaatatttgcaacaccccagtaaagagaattgtaatatgcagattataaaaagaagtcttacaaatcagtaaaaaataaaactagacaaaaatttgaacagatgaaagagaaactctaaataatcattacacatgagaaactcaatctcagaaatcagagaactatcattgcatatacactaaattagagaaatattaaaaggctaagtaacatctgtggcttaattaatctagctctagtgatcagcagttcaacctgttgatagtatgtactaagctctcatgtttaatgtactaagctctcatgtttaatgaactaaaccctcatggctaatgtactaagctctcatggctaatgtactaagctctcatgtttcatgtactaagctctcatgtttgaacaataaaattaatataaatcagcaacttaaatagcctctaaggttttaagttttataagaaaaaaaagaatatataaggcttttaaaggttttaaggtttcctaggttatcctcatatgagctcttagaaaaactcatccagcatcaaatgaaactgcaatttattcatatcaggattatcaataccatatttttgaaaaagtcttttctgtaatgaaggagaaaactcacccaggcagttccataggatggcaagatcctggtatctgtctgcaattccaactcttccaacatcaatacaacctattaatttcccctcatcaaaaataaggttatcaagtgagaaatcaccatgagtgaccactgaatctggtgagaatggcaaaagattatgcatttctttccagacttgttcaacaggccagccatttctctcatcatcaaaatcactggcatcaaccaaaccattattcattcttgattgggcctgagccagtctaaatactctatcagagttaaaaggacaattacaaacaggaatggaatgcaatcttctcaggaacactgccagggcatcaacaatattttcacctgaatcaggatattcttccaatacctggaatgctgttttccctgggatggcagtggtgagtaaccatgcatcatcaggagttctgataaaatgcttgatggttggaagaggcataaattcagtcagccagtttagtctgaccatctcatctgtaacatcattggcaacagaacctttgccatgtttcagaaacaactctggggcatctggcttcccatacaatctatagattgtggcacctgattgcccaacattatctctagcccatttatacccatataaatcagcatccatgttggaatttaatcttggcctggagcaagaggtttctctttgaatatggctcatacatgtgcacctcctatagtgagttgtattatactatgcagatatactatgccaatgtttaattgtcag

SEQ ID NO: 19 - DNA, 8707 bp, synthetic construct
  source 1..8707: mol_type = other DNA; note = Synthetic
cactatgtgttaattaaaattatctctaaggcatgtgaactggctgtcttggttttcatctgtacttcatctgctacctctgtgacctgaaacatatttataattccattaagctgtgcatatgatagatttatcatatgtattttccttaaaggatttttgtaagaactaattgaattgatacctgtaaagtctttatcacactacccaataaataataaatctctttgttcagctctctgtttctataaatatgtaccagttttattgtttttagtggtagtgattttattctctttctatatatatacacacacatgtgtgcattcataaatatatacaatttttatgaataaaaaattattagcaatcaatattgaaaaccactgatttttgtttatgtgagcaaacagcagattaaaaggaatttgaattctcatagctagcaggagtcaatgggaaaaacccattggagccaagtacactgactcaatagggactttccattgggttttgcccagtacataaggtcaatagggggtgagtcaacaggaaagtcccattggagccaagtacattgagtcaatagggactttccaatgggttttgcccagtacataaggtcaatgggaggtaagccaatgggtttttcccattactgacatgtatactgagtcattagggactttccaatgggttttgcccagtacataaggtcaataggggtgaatcaacaggaaagtcccattggagccaagtacactgagtcaatagggactttccattgggttttgcccagtacaaaaggtcaatagggggtgagtcaatgggtttttcccattattggcacatacataaggtcaataggggtgactagtggagaagagcatgcttgagggctgagtgcccctcagtgggcagagagcacatggcccacagtccctgagaagttggggggaggggtgggcaattgaactggtgcctagagaaggtggggcttgggtaaactgggaaagtgatgtggtgtactggctccacctttttccccagggtgggggagaaccatatataagtgcagtagtctctgtgaacattcaagcttctgccttctccctcctgtgagtttggtaagtcactgactgtctatgcctgggaaagggtgggcaggagatggggcagtgcaggaaaagtggcactatgaaccctgcagccctagacaattgtactaaccttcttctctttcctctcctgacaggttggtaaccaagccaccatgaactttggcctgagcctgatcttcctggtgctgatcctgaaaggggtgcagtgtgaagtgcagctggtggaatctggggctgaagtgaagaaacctggggcctctgtgaaggtgtcctgcaaagtgtctggctacaccctgacagagctgagcatgcactgggtcagacaggcccctggcaaaggccttgaatggatgggaggctttgaccctgaggatggggagactatgtatgcccagaaattccagggcagagtgaccatgacagaggacaccagcacagacacagcctacatggaactgagcagccttaggagtgaagatacagctgtgtactactgtgccaccagcactgctgtggctggcacccctgacctgtttgactactactatggcatggatgtgtggggccagggcaccacagtgacagtcagctctgcttccacaaagggcccctctgtgttccctctggctcctagcagcaagagcaccagtggtggaacagctgccctgggctgtctggtcaaggactactttcctgagccagtgactgtgtcctggaacagtggggctctgacatctggggtgcacacattccctgctgtgctccagtcctctggcctgtacagcctctcctctgtggtcactgtgccaagctctagcctgggcacccagacctacatctgcaatgtgaaccacaagcctagcaacaccaaggtggacaagaaggctgagcccaagagctgtgacaagacccacacctgtcctccatgtcctgctccagagctgcttggaggaccttctgtgtttctgttccctccaaagcctaaggacaccctgatgatcagcagaacccctgaagtgacctgtgtggtggtggatgtgtcccatgaggacccagaagtgaagttcaattggtatgtggatggtgttgaggtgcacaatgccaagaccaagcctagagaggaacagtacaacagcacctacagagtggtgtcagtgctgacagtgctgcaccaggactggctgaatggcaaagagtacaagtgcaaggtgtccaacaaggccctgcctgctcctattgaaaagaccatcagcaaggccaagggccagcctagggaaccccaagtgtataccctgccacctagcagagatgagctgaccaagaaccaggtgtccctgacatgcctggttaagggcttctacccctctgacattgctgtggaatgggagagcaatggccagcctgagaacaactacaagacaacccctcctgtgctggactctgatggctcattcttcctgtactccaagctcacagtggacaagtccagatggcagcaaggcaatgtgttcagctgctctgtgatgcatgaggccctgcacaaccactacacacagaagtccctgtctctgagccctggcaagagaaagagaaggagtggctctggggccaccaacttcagcctgctgaaacaggctggggatgttgaagagaaccctggacctatggcctgggctctgctgctgctgggactgctgtctcactgcacaggctctgtgacagagattgtgatgacacagagccctctgtctagccctgtgacactgggacagcctgccagcatcagctgtagaagctctcagagtctggtgcattctgatggcaacacctacctgagctggctgcaacagaggcctggacagccacctagactgctgatctacaagatcagcaacaggttctctggggtcccagacagattctctggaagtggtgctggcacagacttcactctgaagattagcagagtggaagctgaggatgttggggtgtactattgcacccaggccacacagttcccttacacctttggccagggaacaaaagtggacatcaagggcaccaaactgactgtgctgggccagccaaaggctgccccttctgtgactctgtttccacctagctctgaggaactccaggctaacaaggccacacttgtgtgcctgatctctgacttctaccctggggctgtgacagtggcctggaaggctgatagcagcccagtgaaggctggggttgagacaaccacacctagcaagcagagcaacaacaaatatgctgccagcagctacctgagtctgacccctgagcagtggaagtcccacagatcctacagctgccaagtgacccatgagggctctacagtggaaaagactgtggccccaacagagtgcagctgaagatctacttctggctaataaaagatcagagctctagtgatctgtgtgttggttttttgtgtctgcattctagcaggagtcaatgggaaaaacccattggagccaagtacactgactcaatagggactttccattgggttttgcccagtacataaggtcaatagggggtgagtcaacaggaaagtcccattggagccaagtacattgagtcaatagggactttccaatgggttttgcccagtacataaggtcaatgggaggtaagccaatgggtttttcccattactgacatgtatactgagtcattagggactttccaatgggttttgcccagtacataaggtcaataggggtgaatcaacaggaaagtcccattggagccaagtacactgagtcaatagggactttccattgggttttgcccagtacaaaaggtcaatagggggtgagtcaatgggtttttcccattattggcacatacataaggtcaataggggtgactagtggagaagagcatgcttgagggctgagtgcccctcagtgggcagagagcacatggcccacagtccctgagaagttggggggaggggtgggcaattgaactggtgcctagagaaggtggggcttgggtaaactgggaaagtgatgtggtgtactggctccacctttttccccagggtgggggagaaccatatataagtgcagtagtctctgtgaacattcaagcttctgccttctccctcctgtgagtttggtaagtcactgactgtctatgcctgggaaagggtgggcaggagatggggcagtgcaggaaaagtggcactatgaaccctgcagccctagacaattgtactaaccttcttctctttcctctcctgacaggttggtaaccaagccaccatgagcagcagctcttggctgctgctgagtctggtggctgtgacagctgcccagagcaccattgaggaacaggccaagaccttcctggacaagttcaaccatgaggctgaggacctgttctaccagagcagcctggccagctggaactacaacaccaacatcactgaagagaatgtgcagaacatgaacaatgctggggacaagtggagtgccttcctgaaagagcagagcacactggcccagatgtaccctctgcaagagatccagaacctgacagtgaagctccagctccaggctctccagcagaatggcagctctgtgctgtctgaggacaagagcaagagactgaacaccatcctgaacacaatgagcaccatctacagcacaggcaaagtgtgcaaccctgacaaccctcaagagtgcctgctgctggaacctggcctgaatgagatcatggccaacagcctggactacaatgagagactgtgggcctgggagtcttggaggagtgaagtgggaaagcagctgaggcccctgtatgaggaatatgtggtgctgaagaatgagatggccagggccaaccactatgaggactatggggattattggaggggagactatgaagtgaatggtgttgatggctatgactacagcaggggccagctgattgaggatgtggaacacacctttgaggaaatcaagcccctctatgagcacctccatgcctatgtcagagccaagctgatgaatgcttaccccagctacatcagccccattggctgcctgcctgctcatctgctgggagacatgtggggcagattctggaccaacctgtacagcctgactgtgccctttggccagaaacctaacattgatgtgacagatgccatggtggatcaggcctgggatgcccagagaatcttcaaagaggctgagaagttctttgtgtctgtggggctgcccaacatgacccaaggcttttgggagaactccatgctgacagaccctggcaatgtgcaaaaggctgtgtgtcaccccacagcctgggaccttggcaagggagacttcagaatcctgatgtgcaccaaagtgacaatggatgactttctgacagctcaccatgagatgggccacatccagtatgacatggcctatgctgcccagcctttcctgctgagaaatggggccaatgagggcttccatgaggcagtgggagagatcatgagcctgtctgctgccacacctaagcacctgaagtccattggcctgctgagccctgacttccaagaggacaatgagacagagatcaacttcctgctcaagcaggccctgaccattgtgggcacactgcccttcacctacatgctggaaaagtggagatggatggtctttaagggagaaatccccaaggaccagtggatgaagaaatggtgggagatgaagagggaaattgtgggagttgtggaacctgtgccacatgatgagacatactgtgaccctgccagcctgttccatgtgtccaatgactactccttcattaggtactacaccaggacactgtaccagttccagtttcaagaggctctgtgtcaggctgctaaacatgagggcccactgcacaagtgtgacatcagcaactccacagaggctggacagaaactgttcaacatgctgagactgggcaagtctgagccttggactctggccctggaaaatgttgtgggagccaagaatatgaatgtcagacccctgctgaactactttgagcccctgttcacctggctgaaggaccagaacaagaacagctttgttggctggtccacagactggtccccatatgctgaccagagcatcaaagtcagaatcagcctgaagagtgccctgggagataaggcctatgagtggaatgataatgagatgtacctgttcaggtcctctgtggcttatgctatgagacagtactttctgaaagtgaagaaccagatgatcctgtttggagaagaggatgtcagagtggccaacctgaagcctagaatcagcttcaacttctttgtgacagcccctaagaatgtgtctgacatcatccccagaacagaggtggaaaaggccatcagaatgagcaggtccaggatcaatgatgccttcaggctcaatgacaactccctggaatttctgggcattcagcccacactgggccctccaaatcagcctcctgtgtcctaaagatctacttctggctaataaaagatcagagctctagtgatctgtgtgttggttttttgtgtctgcattctagcaagtcaatatgttcaccccaaaaaagctgtttgttaacttgtcaacctcattctaaaatgtatatagaagcccaaaagacaataacaaaaatattcttgtagaacaaaatgggaaagaatgttccactaaatatcaagatttagagcaaagcatgagatgtgtggggatagacagtgaggctgataaaatagagtagagctcagaaacagacccattgatatatgtaagtgacctatgaaaaaaatatggcattttacaatgggaaaatgatggtctttttcttttttagaaaaacagggaaatatatttatatgtaaaaaataaaagggaacccatatgtcataccatacacacaaaaaaattccagtgaattataagtctaaatggagaaggcaaaactttaaatcttttagaaaataatatagaagcatgccatcaagacttcagtgtagagaaaaatttcttatgactcaaagtcctaaccacaaagaaaagattgttaattagattgcatgaatattaagacttatttttaaaattaaaaaaccattaagaaaagtcaggccatagaatgacagaaaatatttgcaacaccccagtaaagagaattgtaatatgcagattataaaaagaagtcttacaaatcagtaaaaaataaaactagacaaaaatttgaacagatgaaagagaaactctaaataatcattacacatgagaaactcaatctcagaaatcagagaactatcattgcatatacactaaattagagaaatattaaaaggctaagtaacatctgtggcttaattaatctagctctagtgatcagcagttcaacctgttgatagtatgtactaagctctcatgtttaatgtactaagctctcatgtttaatgaactaaaccctcatggctaatgtactaagctctcatggctaatgtactaagctctcatgtttcatgtactaagctctcatgtttgaacaataaaattaatataaatcagcaacttaaatagcctctaaggttttaagttttataagaaaaaaaagaatatataaggcttttaaaggttttaaggtttcctaggttatcctcatatgagctcttagaaaaactcatccagcatcaaatgaaactgcaatttattcatatcaggattatcaataccatatttttgaaaaagtcttttctgtaatgaaggagaaaactcacccaggcagttccataggatggcaagatcctggtatctgtctgcaattccaactcttccaacatcaatacaacctattaatttcccctcatcaaaaataaggttatcaagtgagaaatcaccatgagtgaccactgaatctggtgagaatggcaaaagattatgcatttctttccagacttgttcaacaggccagccatttctctcatcatcaaaatcactggcatcaaccaaaccattattcattcttgattgggcctgagccagtctaaatactctatcagagttaaaaggacaattacaaacaggaatggaatgcaatcttctcaggaacactgccagggcatcaacaatattttcacctgaatcaggatattcttccaatacctggaatgctgttttccctgggatggcagtggtgagtaaccatgcatcatcaggagttctgataaaatgcttgatggttggaagaggcataaattcagtcagccagtttagtctgaccatctcatctgtaacatcattggcaacagaacctttgccatgtttcagaaacaactctggggcatctggcttcccatacaatctatagattgtggcacctgattgcccaacattatctctagcccatttatacccatataaatcagcatccatgttggaatttaatcttggcctggagcaagaggtttctctttgaatatggctcatacatgtgcacctcctatagtgagttgtattatactatgcagatatactatgccaatgtttaattgtcag

SEQ ID NO: 20 - DNA, 5560 bp, synthetic construct
  source 1..5560: mol_type = other DNA; note = Synthetic
cactatgtgttaattaaaattatctctaaggcatgtgaactggctgtcttggttttcatctgtacttcatctgctacctctgtgacctgaaacatatttataattccattaagctgtgcatatgatagatttatcatatgtattttccttaaaggatttttgtaagaactaattgaattgatacctgtaaagtctttatcacactacccaataaataataaatctctttgttcagctctctgtttctataaatatgtaccagttttattgtttttagtggtagtgattttattctctttctatatatatacacacacatgtgtgcattcataaatatatacaatttttatgaataaaaaattattagcaatcaatattgaaaaccactgatttttgtttatgtgagcaaacagcagattaaaaggaatttgaattctcatagctagcaggagtcaatgggaaaaacccattggagccaagtacactgactcaatagggactttccattgggttttgcccagtacataaggtcaatagggggtgagtcaacaggaaagtcccattggagccaagtacattgagtcaatagggactttccaatgggttttgcccagtacataaggtcaatgggaggtaagccaatgggtttttcccattactgacatgtatactgagtcattagggactttccaatgggttttgcccagtacataaggtcaataggggtgaatcaacaggaaagtcccattggagccaagtacactgagtcaatagggactttccattgggttttgcccagtacaaaaggtcaatagggggtgagtcaatgggtttttcccattattggcacatacataaggtcaataggggtgactagtggagaagagcatgcttgagggctgagtgcccctcagtgggcagagagcacatggcccacagtccctgagaagttggggggaggggtgggcaattgaactggtgcctagagaaggtggggcttgggtaaactgggaaagtgatgtggtgtactggctccacctttttccccagggtgggggagaaccatatataagtgcagtagtctctgtgaacattcaagcttctgccttctccctcctgtgagtttggtaagtcactgactgtctatgcctgggaaagggtgggcaggagatggggcagtgcaggaaaagtggcactatgaaccctgcagccctagacaattgtactaaccttcttctctttcctctcctgacaggttggtaaccaagccaccatgagcagcagctcttggctgctgctgagtctggtggctgtgacagctgcccagagcaccattgaggaacaggccaagaccttcctggacaagttcaaccatgaggctgaggacctgttctaccagagcagcctggccagctggaactacaacaccaacatcactgaagagaatgtgcagaacatgaacaatgctggggacaagtggagtgccttcctgaaagagcagagcacactggcccagatgtaccctctgcaagagatccagaacctgacagtgaagctccagctccaggctctccagcagaatggcagctctgtgctgtctgaggacaagagcaagagactgaacaccatcctgaacacaatgagcaccatctacagcacaggcaaagtgtgcaaccctgacaaccctcaagagtgcctgctgctggaacctggcctgaatgagatcatggccaacagcctggactacaatgagagactgtgggcctgggagtcttggaggagtgaagtgggaaagcagctgaggcccctgtatgaggaatatgtggtgctgaagaatgagatggccagggccaaccactatgaggactatggggattattggaggggagactatgaagtgaatggtgttgatggctatgactacagcaggggccagctgattgaggatgtggaacacacctttgaggaaatcaagcccctctatgagcacctccatgcctatgtcagagccaagctgatgaatgcttaccccagctacatcagccccattggctgcctgcctgctcatctgctgggagacatgtggggcagattctggaccaacctgtacagcctgactgtgccctttggccagaaacctaacattgatgtgacagatgccatggtggatcaggcctgggatgcccagagaatcttcaaagaggctgagaagttctttgtgtctgtggggctgcccaacatgacccaaggcttttgggagaactccatgctgacagaccctggcaatgtgcaaaaggctgtgtgtcaccccacagcctgggaccttggcaagggagacttcagaatcctgatgtgcaccaaagtgacaatggatgactttctgacagctcaccatgagatgggccacatccagtatgacatggcctatgctgcccagcctttcctgctgagaaatggggccaatgagggcttccatgaggcagtgggagagatcatgagcctgtctgctgccacacctaagcacctgaagtccattggcctgctgagccctgacttccaagaggacaatgagacagagatcaacttcctgctcaagcaggccctgaccattgtgggcacactgcccttcacctacatgctggaaaagtggagatggatggtctttaagggagaaatccccaaggaccagtggatgaagaaatggtgggagatgaagagggaaattgtgggagttgtggaacctgtgccacatgatgagacatactgtgaccctgccagcctgttccatgtgtccaatgactactccttcattaggtactacaccaggacactgtaccagttccagtttcaagaggctctgtgtcaggctgctaaacatgagggcccactgcacaagtgtgacatcagcaactccacagaggctggacagaaactgttcaacatgctgagactgggcaagtctgagccttggactctggccctggaaaatgttgtgggagccaagaatatgaatgtcagacccctgctgaactactttgagcccctgttcacctggctgaaggaccagaacaagaacagctttgttggctggtccacagactggtccccatatgctgaccagagcatcaaagtcagaatcagcctgaagagtgccctgggagataaggcctatgagtggaatgataatgagatgtacctgttcaggtcctctgtggcttatgctatgagacagtactttctgaaagtgaagaaccagatgatcctgtttggagaagaggatgtcagagtggccaacctgaagcctagaatcagcttcaacttctttgtgacagcccctaagaatgtgtctgacatcatccccagaacagaggtggaaaaggccatcagaatgagcaggtccaggatcaatgatgccttcaggctcaatgacaactccctggaatttctgggcattcagcccacactgggccctccaaatcagcctcctgtgtcctaaagatctacttctggctaataaaagatcagagctctagtgatctgtgtgttggttttttgtgtctgcattctagcaagtcaatatgttcaccccaaaaaagctgtttgttaacttgtcaacctcattctaaaatgtatatagaagcccaaaagacaataacaaaaatattcttgtagaacaaaatgggaaagaatgttccactaaatatcaagatttagagcaaagcatgagatgtgtggggatagacagtgaggctgataaaatagagtagagctcagaaacagacccattgatatatgtaagtgacctatgaaaaaaatatggcattttacaatgggaaaatgatggtctttttcttttttagaaaaacagggaaatatatttatatgtaaaaaataaaagggaacccatatgtcataccatacacacaaaaaaattccagtgaattataagtctaaatggagaaggcaaaactttaaatcttttagaaaataatatagaagcatgccatcaagacttcagtgtagagaaaaatttcttatgactcaaagtcctaaccacaaagaaaagattgttaattagattgcatgaatattaagacttatttttaaaattaaaaaaccattaagaaaagtcaggccatagaatgacagaaaatatttgcaacaccccagtaaagagaattgtaatatgcagattataaaaagaagtcttacaaatcagtaaaaaataaaactagacaaaaatttgaacagatgaaagagaaactctaaataatcattacacatgagaaactcaatctcagaaatcagagaactatcattgcatatacactaaattagagaaatattaaaaggctaagtaacatctgtggcttaattaatctagctctagtgatcagcagttcaacctgttgatagtatgtactaagctctcatgtttaatgtactaagctctcatgtttaatgaactaaaccctcatggctaatgtactaagctctcatggctaatgtactaagctctcatgtttcatgtactaagctctcatgtttgaacaataaaattaatataaatcagcaacttaaatagcctctaaggttttaagttttataagaaaaaaaagaatatataaggcttttaaaggttttaaggtttcctaggttatcctcatatgagctcttagaaaaactcatccagcatcaaatgaaactgcaatttattcatatcaggattatcaataccatatttttgaaaaagtcttttctgtaatgaaggagaaaactcacccaggcagttccataggatggcaagatcctggtatctgtctgcaattccaactcttccaacatcaatacaacctattaatttcccctcatcaaaaataaggttatcaagtgagaaatcaccatgagtgaccactgaatctggtgagaatggcaaaagattatgcatttctttccagacttgttcaacaggccagccatttctctcatcatcaaaatcactggcatcaaccaaaccattattcattcttgattgggcctgagccagtctaaatactctatcagagttaaaaggacaattacaaacaggaatggaatgcaatcttctcaggaacactgccagggcatcaacaatattttcacctgaatcaggatattcttccaatacctggaatgctgttttccctgggatggcagtggtgagtaaccatgcatcatcaggagttctgataaaatgcttgatggttggaagaggcataaattcagtcagccagtttagtctgaccatctcatctgtaacatcattggcaacagaacctttgccatgtttcagaaacaactctggggcatctggcttcccatacaatctatagattgtggcacctgattgcccaacattatctctagcccatttatacccatataaatcagcatccatgttggaatttaatcttggcctggagcaagaggtttctctttgaatatggctcatacatgtgcacctcctatagtgagttgtattatactatgcagatatactatgccaatgtttaattgtcag

SEQ ID NO: 21 - DNA, 5560 bp, synthetic construct
  source 1..5560: mol_type = other DNA; note = Synthetic
cactatgtgttaattaaaattatctctaaggcatgtgaactggctgtcttggttttcatctgtacttcatctgctacctctgtgacctgaaacatatttataattccattaagctgtgcatatgatagatttatcatatgtattttccttaaaggatttttgtaagaactaattgaattgatacctgtaaagtctttatcacactacccaataaataataaatctctttgttcagctctctgtttctataaatatgtaccagttttattgtttttagtggtagtgattttattctctttctatatatatacacacacatgtgtgcattcataaatatatacaatttttatgaataaaaaattattagcaatcaatattgaaaaccactgatttttgtttatgtgagcaaacagcagattaaaaggaatttgaattctcatagctagcaggagtcaatgggaaaaacccattggagccaagtacactgactcaatagggactttccattgggttttgcccagtacataaggtcaatagggggtgagtcaacaggaaagtcccattggagccaagtacattgagtcaatagggactttccaatgggttttgcccagtacataaggtcaatgggaggtaagccaatgggtttttcccattactgacatgtatactgagtcattagggactttccaatgggttttgcccagtacataaggtcaataggggtgaatcaacaggaaagtcccattggagccaagtacactgagtcaatagggactttccattgggttttgcccagtacaaaaggtcaatagggggtgagtcaatgggtttttcccattattggcacatacataaggtcaataggggtgactagtggagaagagcatgcttgagggctgagtgcccctcagtgggcagagagcacatggcccacagtccctgagaagttggggggaggggtgggcaattgaactggtgcctagagaaggtggggcttgggtaaactgggaaagtgatgtggtgtactggctccacctttttccccagggtgggggagaaccatatataagtgcagtagtctctgtgaacattcaagcttctgccttctccctcctgtgagtttggtaagtcactgactgtctatgcctgggaaagggtgggcaggagatggggcagtgcaggaaaagtggcactatgaaccctgcagccctagacaattgtactaaccttcttctctttcctctcctgacaggttggtaaccaagccaccatgagcagcagctcttggctgctgctgagtctggtggctgtgacagctgcccagagcaccattgaggaacaggccaagtacttcctggacaagttcaaccatgaggctgaggacctgttctaccagagcagcctggccagctggaactacaacaccaacatcactgaagagaatgtgcagaacatgaacaatgctggggacaagtggagtgccttcctgaaagagcagagcacaactgcccagatgtaccctctgcaagagatccagaacctgacagtgaagctccagctccaggctctccagcagaatggcagctctgtgctgtctgaggacaagagcaagagactgaacaccatcctgaacacaatgagcaccatctacagcacaggcaaagtgtgcaaccctgacaaccctcaagagtgcctgctgctggaacctggcctgaatgagatcatggccaacagcctggactacaatgagagactgtgggcctgggagtcttggaggagtgaagtgggaaagcagctgaggcccctgtatgaggaatatgtggtgctgaagaatgagatggccagggccaaccactatgaggactatggggattattggaggggagactatgaagtgaatggtgttgatggctatgactacagcaggggccagctgattgaggatgtggaacacacctttgaggaaatcaagcccctctatgagcacctccatgcctatgtcagagccaagctgatgaatgcttaccccagctacatcagccccattggctgcctgcctgctcatctgctgggagacatgtggggcagattctggaccaacctgtacagcctgactgtgccctttggccagaaacctaacattgatgtgacagatgccatggtggatcaggcctgggatgcccagagaatcttcaaagaggctgagaagttctttgtgtctgtggggctgcccaacatgacccaaggcttttgggagtactccatgctgacagaccctggcaatgtgcaaaaggctgtgtgtcaccccacagcctgggaccttggcaagggagacttcagaatcctgatgtgcaccaaagtgacaatggatgactttctgacagctcaccatgagatgggccacatccagtatgacatggcctatgctgcccagcctttcctgctgagaaatggggccaatgagggcttccatgaggcagtgggagagatcatgagcctgtctgctgccacacctaagcacctgaagtccattggcctgctgagccctgacttccaagaggacaatgagacagagatcaacttcctgctcaagcaggccctgaccattgtgggcacactgcccttcacctacatgctggaaaagtggagatggatggtctttaagggagaaatccccaaggaccagtggatgaagaaatggtgggagatgaagagggaaattgtgggagttgtggaacctgtgccacatgatgagacatactgtgaccctgccagcctgttccatgtgtccaatgactactccttcattaggtactacaccaggacactgtaccagttccagtttcaagaggctctgtgtcaggctgctaaacatgagggcccactgcacaagtgtgacatcagcaactccacagaggctggacagaaactgttcaacatgctgagactgggcaagtctgagccttggactctggccctggaaaatgttgtgggagccaagaatatgaatgtcagacccctgctgaactactttgagcccctgttcacctggctgaaggaccagaacaagaacagctttgttggctggtccacagactggtccccatatgctgaccagagcatcaaagtcagaatcagcctgaagagtgccctgggagataaggcctatgagtggaatgataatgagatgtacctgttcaggtcctctgtggcttatgctatgagacagtactttctgaaagtgaagaaccagatgatcctgtttggagaagaggatgtcagagtggccaacctgaagcctagaatcagcttcaacttctttgtgacagcccctaagaatgtgtctgacatcatccccagaacagaggtggaaaaggccatcagaatgagcaggtccaggatcaatgatgccttcaggctcaatgacaactccctggaatttctgggcattcagcccacactgggccctccaaatcagcctcctgtgtcctaaagatctacttctggctaataaaagatcagagctctagtgatctgtgtgttggttttttgtgtctgcattctagcaagtcaatatgttcaccccaaaaaagctgtttgttaacttgtcaacctcattctaaaatgtatatagaagcccaaaagacaataacaaaaatattcttgtagaacaaaatgggaaagaatgttccactaaatatcaagatttagagcaaagcatgagatgtgtggggatagacagtgaggctgataaaatagagtagagctcagaaacagacccattgatatatgtaagtgacctatgaaaaaaatatggcattttacaatgggaaaatgatggtctttttcttttttagaaaaacagggaaatatatttatatgtaaaaaataaaagggaacccatatgtcataccatacacacaaaaaaattccagtgaattataagtctaaatggagaaggcaaaactttaaatcttttagaaaataatatagaagcatgccatcaagacttcagtgtagagaaaaatttcttatgactcaaagtcctaaccacaaagaaaagattgttaattagattgcatgaatattaagacttatttttaaaattaaaaaaccattaagaaaagtcaggccatagaatgacagaaaatatttgcaacaccccagtaaagagaattgtaatatgcagattataaaaagaagtcttacaaatcagtaaaaaataaaactagacaaaaatttgaacagatgaaagagaaactctaaataatcattacacatgagaaactcaatctcagaaatcagagaactatcattgcatatacactaaattagagaaatattaaaaggctaagtaacatctgtggcttaattaatctagctctagtgatcagcagttcaacctgttgatagtatgtactaagctctcatgtttaatgtactaagctctcatgtttaatgaactaaaccctcatggctaatgtactaagctctcatggctaatgtactaagctctcatgtttcatgtactaagctctcatgtttgaacaataaaattaatataaatcagcaacttaaatagcctctaaggttttaagttttataagaaaaaaaagaatatataaggcttttaaaggttttaaggtttcctaggttatcctcatatgagctcttagaaaaactcatccagcatcaaatgaaactgcaatttattcatatcaggattatcaataccatatttttgaaaaagtcttttctgtaatgaaggagaaaactcacccaggcagttccataggatggcaagatcctggtatctgtctgcaattccaactcttccaacatcaatacaacctattaatttcccctcatcaaaaataaggttatcaagtgagaaatcaccatgagtgaccactgaatctggtgagaatggcaaaagattatgcatttctttccagacttgttcaacaggccagccatttctctcatcatcaaaatcactggcatcaaccaaaccattattcattcttgattgggcctgagccagtctaaatactctatcagagttaaaaggacaattacaaacaggaatggaatgcaatcttctcaggaacactgccagggcatcaacaatattttcacctgaatcaggatattcttccaatacctggaatgctgttttccctgggatggcagtggtgagtaaccatgcatcatcaggagttctgataaaatgcttgatggttggaagaggcataaattcagtcagccagtttagtctgaccatctcatctgtaacatcattggcaacagaacctttgccatgtttcagaaacaactctggggcatctggcttcccatacaatctatagattgtggcacctgattgcccaacattatctctagcccatttatacccatataaatcagcatccatgttggaatttaatcttggcctggagcaagaggtttctctttgaatatggctcatacatgtgcacctcctatagtgagttgtattatactatgcagatatactatgccaatgtttaattgtcag

SEQ ID NO: 22 - DNA, 6271 bp, synthetic construct
  source 1..6271: mol_type = other DNA; note = Synthetic
cactatgtgttaattaaaattatctctaaggcatgtgaactggctgtcttggttttcatctgtacttcatctgctacctctgtgacctgaaacatatttataattccattaagctgtgcatatgatagatttatcatatgtattttccttaaaggatttttgtaagaactaattgaattgatacctgtaaagtctttatcacactacccaataaataataaatctctttgttcagctctctgtttctataaatatgtaccagttttattgtttttagtggtagtgattttattctctttctatatatatacacacacatgtgtgcattcataaatatatacaatttttatgaataaaaaattattagcaatcaatattgaaaaccactgatttttgtttatgtgagcaaacagcagattaaaaggaatttgaattctcatagctagcaggagtcaatgggaaaaacccattggagccaagtacactgactcaatagggactttccattgggttttgcccagtacataaggtcaatagggggtgagtcaacaggaaagtcccattggagccaagtacattgagtcaatagggactttccaatgggttttgcccagtacataaggtcaatgggaggtaagccaatgggtttttcccattactgacatgtatactgagtcattagggactttccaatgggttttgcccagtacataaggtcaataggggtgaatcaacaggaaagtcccattggagccaagtacactgagtcaatagggactttccattgggttttgcccagtacaaaaggtcaatagggggtgagtcaatgggtttttcccattattggcacatacataaggtcaataggggtgactagtggagaagagcatgcttgagggctgagtgcccctcagtgggcagagagcacatggcccacagtccctgagaagttggggggaggggtgggcaattgaactggtgcctagagaaggtggggcttgggtaaactgggaaagtgatgtggtgtactggctccacctttttccccagggtgggggagaaccatatataagtgcagtagtctctgtgaacattcaagcttctgccttctccctcctgtgagtttggtaagtcactgactgtctatgcctgggaaagggtgggcaggagatggggcagtgcaggaaaagtggcactatgaaccctgcagccctagacaattgtactaaccttcttctctttcctctcctgacaggttggtaaccaagccaccatgagcagcagctcttggctgctgctgagtctggtggctgtgacagctgcccagagcaccattgaggaacaggccaagaccttcctggacaagttcaaccatgaggctgaggacctgttctaccagagcagcctggccagctggaactacaacaccaacatcactgaagagaatgtgcagaacatgaacaatgctggggacaagtggagtgccttcctgaaagagcagagcacactggcccagatgtaccctctgcaagagatccagaacctgacagtgaagctccagctccaggctctccagcagaatggcagctctgtgctgtctgaggacaagagcaagagactgaacaccatcctgaacacaatgagcaccatctacagcacaggcaaagtgtgcaaccctgacaaccctcaagagtgcctgctgctggaacctggcctgaatgagatcatggccaacagcctggactacaatgagagactgtgggcctgggagtcttggaggagtgaagtgggaaagcagctgaggcccctgtatgaggaatatgtggtgctgaagaatgagatggccagggccaaccactatgaggactatggggattattggaggggagactatgaagtgaatggtgttgatggctatgactacagcaggggccagctgattgaggatgtggaacacacctttgaggaaatcaagcccctctatgagcacctccatgcctatgtcagagccaagctgatgaatgcttaccccagctacatcagccccattggctgcctgcctgctcatctgctgggagacatgtggggcagattctggaccaacctgtacagcctgactgtgccctttggccagaaacctaacattgatgtgacagatgccatggtggatcaggcctgggatgcccagagaatcttcaaagaggctgagaagttctttgtgtctgtggggctgcccaacatgacccaaggcttttgggagaactccatgctgacagaccctggcaatgtgcaaaaggctgtgtgtcaccccacagcctgggaccttggcaagggagacttcagaatcctgatgtgcaccaaagtgacaatggatgactttctgacagctcaccatgagatgggccacatccagtatgacatggcctatgctgcccagcctttcctgctgagaaatggggccaatgagggcttccatgaggcagtgggagagatcatgagcctgtctgctgccacacctaagcacctgaagtccattggcctgctgagccctgacttccaagaggacaatgagacagagatcaacttcctgctcaagcaggccctgaccattgtgggcacactgcccttcacctacatgctggaaaagtggagatggatggtctttaagggagaaatccccaaggaccagtggatgaagaaatggtgggagatgaagagggaaattgtgggagttgtggaacctgtgccacatgatgagacatactgtgaccctgccagcctgttccatgtgtccaatgactactccttcattaggtactacaccaggacactgtaccagttccagtttcaagaggctctgtgtcaggctgctaaacatgagggcccactgcacaagtgtgacatcagcaactccacagaggctggacagaaactgttcaacatgctgagactgggcaagtctgagccttggactctggccctggaaaatgttgtgggagccaagaatatgaatgtcagacccctgctgaactactttgagcccctgttcacctggctgaaggaccagaacaagaacagctttgttggctggtccacagactggtccccatatgctgaccagagcatcaaagtcagaatcagcctgaagagtgccctgggagataaggcctatgagtggaatgataatgagatgtacctgttcaggtcctctgtggcttatgctatgagacagtactttctgaaagtgaagaaccagatgatcctgtttggagaagaggatgtcagagtggccaacctgaagcctagaatcagcttcaacttctttgtgacagcccctaagaatgtgtctgacatcatccccagaacagaggtggaaaaggccatcagaatgagcaggtccaggatcaatgatgccttcaggctcaatgacaactccctggaatttctgggcattcagcccacactgggccctccaaatcagcctcctgtgtctggtggaggaggtagtgagcccaagagctgtgacaagacccacacctgtcctccatgtcctgctccagagctgcttggaggaccttctgtgtttctgttccctccaaagccaaaggacaccctgatgatcagcagaacccctgaagtgacctgtgtggtggtggatgtgtcccatgaggacccagaagtgaagttcaattggtatgtggatggtgttgaggtgcacaatgccaagaccaagcctagagaggaacagtacaacagcacctacagggttgtgtcagtgctgactgtgctgcaccaggactggctgaatggcaaagagtacaagtgcaaggtgtccaacaaggccctgcctgctcctattgaaaagaccatcagcaaggccaagggacagcctagggaaccccaggtgtacacactgccacctagcagagatgagctgaccaagaatcaggtgtccctgacatgccttgtgaagggcttctacccttctgacattgcagtggaatgggagagcaatggccagcctgagaacaactacaagacaacccctcctgtgctggactctgatggctcattcttcctgtactccaagctgacagtggacaagtccagatggcagcaaggcaatgtgttcagctgctctgtgatgcatgaggccctgcacaaccactacacacagaagtccctgtctctgagccctggcaagtgaagatctacttctggctaataaaagatcagagctctagtgatctgtgtgttggttttttgtgtctgcattctagcaagtcaatatgttcaccccaaaaaagctgtttgttaacttgtcaacctcattctaaaatgtatatagaagcccaaaagacaataacaaaaatattcttgtagaacaaaatgggaaagaatgttccactaaatatcaagatttagagcaaagcatgagatgtgtggggatagacagtgaggctgataaaatagagtagagctcagaaacagacccattgatatatgtaagtgacctatgaaaaaaatatggcattttacaatgggaaaatgatggtctttttcttttttagaaaaacagggaaatatatttatatgtaaaaaataaaagggaacccatatgtcataccatacacacaaaaaaattccagtgaattataagtctaaatggagaaggcaaaactttaaatcttttagaaaataatatagaagcatgccatcaagacttcagtgtagagaaaaatttcttatgactcaaagtcctaaccacaaagaaaagattgttaattagattgcatgaatattaagacttatttttaaaattaaaaaaccattaagaaaagtcaggccatagaatgacagaaaatatttgcaacaccccagtaaagagaattgtaatatgcagattataaaaagaagtcttacaaatcagtaaaaaataaaactagacaaaaatttgaacagatgaaagagaaactctaaataatcattacacatgagaaactcaatctcagaaatcagagaactatcattgcatatacactaaattagagaaatattaaaaggctaagtaacatctgtggcttaattaatctagctctagtgatcagcagttcaacctgttgatagtatgtactaagctctcatgtttaatgtactaagctctcatgtttaatgaactaaaccctcatggctaatgtactaagctctcatggctaatgtactaagctctcatgtttcatgtactaagctctcatgtttgaacaataaaattaatataaatcagcaacttaaatagcctctaaggttttaagttttataagaaaaaaaagaatatataaggcttttaaaggttttaaggtttcctaggttatcctcatatgagctcttagaaaaactcatccagcatcaaatgaaactgcaatttattcatatcaggattatcaataccatatttttgaaaaagtcttttctgtaatgaaggagaaaactcacccaggcagttccataggatggcaagatcctggtatctgtctgcaattccaactcttccaacatcaatacaacctattaatttcccctcatcaaaaataaggttatcaagtgagaaatcaccatgagtgaccactgaatctggtgagaatggcaaaagattatgcatttctttccagacttgttcaacaggccagccatttctctcatcatcaaaatcactggcatcaaccaaaccattattcattcttgattgggcctgagccagtctaaatactctatcagagttaaaaggacaattacaaacaggaatggaatgcaatcttctcaggaacactgccagggcatcaacaatattttcacctgaatcaggatattcttccaatacctggaatgctgttttccctgggatggcagtggtgagtaaccatgcatcatcaggagttctgataaaatgcttgatggttggaagaggcataaattcagtcagccagtttagtctgaccatctcatctgtaacatcattggcaacagaacctttgccatgtttcagaaacaactctggggcatctggcttcccatacaatctatagattgtggcacctgattgcccaacattatctctagcccatttatacccatataaatcagcatccatgttggaatttaatcttggcctggagcaagaggtttctctttgaatatggctcatacatgtgcacctcctatagtgagttgtattatactatgcagatatactatgccaatgtttaattgtcag

SEQ ID NO: 23 - DNA, 6271 bp, synthetic construct
  source 1..6271: mol_type = other DNA; note = Synthetic
cactatgtgttaattaaaattatctctaaggcatgtgaactggctgtcttggttttcatctgtacttcatctgctacctctgtgacctgaaacatatttataattccattaagctgtgcatatgatagatttatcatatgtattttccttaaaggatttttgtaagaactaattgaattgatacctgtaaagtctttatcacactacccaataaataataaatctctttgttcagctctctgtttctataaatatgtaccagttttattgtttttagtggtagtgattttattctctttctatatatatacacacacatgtgtgcattcataaatatatacaatttttatgaataaaaaattattagcaatcaatattgaaaaccactgatttttgtttatgtgagcaaacagcagattaaaaggaatttgaattctcatagctagcaggagtcaatgggaaaaacccattggagccaagtacactgactcaatagggactttccattgggttttgcccagtacataaggtcaatagggggtgagtcaacaggaaagtcccattggagccaagtacattgagtcaatagggactttccaatgggttttgcccagtacataaggtcaatgggaggtaagccaatgggtttttcccattactgacatgtatactgagtcattagggactttccaatgggttttgcccagtacataaggtcaataggggtgaatcaacaggaaagtcccattggagccaagtacactgagtcaatagggactttccattgggttttgcccagtacaaaaggtcaatagggggtgagtcaatgggtttttcccattattggcacatacataaggtcaataggggtgactagtggagaagagcatgcttgagggctgagtgcccctcagtgggcagagagcacatggcccacagtccctgagaagttggggggaggggtgggcaattgaactggtgcctagagaaggtggggcttgggtaaactgggaaagtgatgtggtgtactggctccacctttttccccagggtgggggagaaccatatataagtgcagtagtctctgtgaacattcaagcttctgccttctccctcctgtgagtttggtaagtcactgactgtctatgcctgggaaagggtgggcaggagatggggcagtgcaggaaaagtggcactatgaaccctgcagccctagacaattgtactaaccttcttctctttcctctcctgacaggttggtaaccaagccaccatgagcagcagctcttggctgctgctgagtctggtggctgtgacagctgcccagagcaccattgaggaacaggccaagaccttcctggacaagttcaaccatgaggctgaggacctgttctaccagagcagcctggccagctggaactacaacaccaacatcactgaagagaatgtgcagaacatgaacaatgctggggacaagtggagtgccttcctgaaagagcagagcacactggcccagatgtaccctctgcaagagatccagaacctgacagtgaagctccagctccaggctctccagcagaatggcagctctgtgctgtctgaggacaagagcaagagactgaacaccatcctgaacacaatgagcaccatctacagcacaggcaaagtgtgcaaccctgacaaccctcaagagtgcctgctgctggaacctggcctgaatgagatcatggccaacagcctggactacaatgagagactgtgggcctgggagtcttggaggagtgaagtgggaaagcagctgaggcccctgtatgaggaatatgtggtgctgaagaatgagatggccagggccaaccactatgaggactatggggattattggaggggagactatgaagtgaatggtgttgatggctatgactacagcaggggccagctgattgaggatgtggaacacacctttgaggaaatcaagcccctctatgagcacctccatgcctatgtcagagccaagctgatgaatgcttaccccagctacatcagccccattggctgcctgcctgctcatctgctgggagacatgtggggcagattctggaccaacctgtacagcctgactgtgccctttggccagaaacctaacattgatgtgacagatgccatggtggatcaggcctgggatgcccagagaatcttcaaagaggctgagaagttctttgtgtctgtggggctgcccaacatgacccaaggcttttgggagaactccatgctgacagaccctggcaatgtgcaaaaggctgtgtgtcaccccacagcctgggaccttggcaagggagacttcagaatcctgatgtgcaccaaagtgacaatggatgactttctgacagctcaccatgagatgggccacatccagtatgacatggcctatgctgcccagcctttcctgctgagaaatggggccaatgagggcttccatgaggcagtgggagagatcatgagcctgtctgctgccacacctaagcacctgaagtccattggcctgctgagccctgacttccaagaggacaatgagacagagatcaacttcctgctcaagcaggccctgaccattgtgggcacactgcccttcacctacatgctggaaaagtggagatggatggtctttaagggagaaatccccaaggaccagtggatgaagaaatggtgggagatgaagagggaaattgtgggagttgtggaacctgtgccacatgatgagacatactgtgaccctgccagcctgttccatgtgtccaatgactactccttcattaggtactacaccaggacactgtaccagttccagtttcaagaggctctgtgtcaggctgctaaacatgagggcccactgcacaagtgtgacatcagcaactccacagaggctggacagaaactgttcaacatgctgagactgggcaagtctgagccttggactctggccctggaaaatgttgtgggagccaagaatatgaatgtcagacccctgctgaactactttgagcccctgttcacctggctgaaggaccagaacaagaacagctttgttggctggtccacagactggtccccatatgctgaccagagcatcaaagtcagaatcagcctgaagagtgccctgggagataaggcctatgagtggaatgataatgagatgtacctgttcaggtcctctgtggcttatgctatgagacagtactttctgaaagtgaagaaccagatgatcctgtttggagaagaggatgtcagagtggccaacctgaagcctagaatcagcttcaacttctttgtgacagcccctaagaatgtgtctgacatcatccccagaacagaggtggaaaaggccatcagaatgagcaggtccaggatcaatgatgccttcaggctcaatgacaactccctggaatttctgggcattcagcccacactgggccctccaaatcagcctcctgtgtctggtggaggaggtagtgagcccaagagctgtgacaagacccacacctgtcctccatgtcctgctccagaggctgctggaggaccttctgtgtttctgttccctccaaagccaaaggacaccctgatgatcagcagaacccctgaagtgacctgtgtggtggtggatgtgtcccatgaggacccagaagtgaagttcaattggtatgtggatggtgttgaggtgcacaatgccaagaccaagcctagagaggaacagtacaacagcacctacagggttgtgtcagtgctgactgtgctgcaccaggactggctgaatggcaaagagtacaagtgcaaggtgtccaacaaggccctgcctgctcctattgaaaagaccatcagcaaggccaagggacagcctagggaaccccaggtgtacacactgccacctagcagagatgagctgaccaagaatcaggtgtccctgacatgccttgtgaagggcttctacccttctgacattgcagtggaatgggagagcaatggccagcctgagaacaactacaagacaacccctcctgtgctggactctgatggctcattcttcctgtactccaagctgacagtggacaagtccagatggcagcaaggcaatgtgttcagctgctctgtgatgcatgaggccctgcacaaccactacacacagaagtccctgtctctgagccctggcaagtgaagatctacttctggctaataaaagatcagagctctagtgatctgtgtgttggttttttgtgtctgcattctagcaagtcaatatgttcaccccaaaaaagctgtttgttaacttgtcaacctcattctaaaatgtatatagaagcccaaaagacaataacaaaaatattcttgtagaacaaaatgggaaagaatgttccactaaatatcaagatttagagcaaagcatgagatgtgtggggatagacagtgaggctgataaaatagagtagagctcagaaacagacccattgatatatgtaagtgacctatgaaaaaaatatggcattttacaatgggaaaatgatggtctttttcttttttagaaaaacagggaaatatatttatatgtaaaaaataaaagggaacccatatgtcataccatacacacaaaaaaattccagtgaattataagtctaaatggagaaggcaaaactttaaatcttttagaaaataatatagaagcatgccatcaagacttcagtgtagagaaaaatttcttatgactcaaagtcctaaccacaaagaaaagattgttaattagattgcatgaatattaagacttatttttaaaattaaaaaaccattaagaaaagtcaggccatagaatgacagaaaatatttgcaacaccccagtaaagagaattgtaatatgcagattataaaaagaagtcttacaaatcagtaaaaaataaaactagacaaaaatttgaacagatgaaagagaaactctaaataatcattacacatgagaaactcaatctcagaaatcagagaactatcattgcatatacactaaattagagaaatattaaaaggctaagtaacatctgtggcttaattaatctagctctagtgatcagcagttcaacctgttgatagtatgtactaagctctcatgtttaatgtactaagctctcatgtttaatgaactaaaccctcatggctaatgtactaagctctcatggctaatgtactaagctctcatgtttcatgtactaagctctcatgtttgaacaataaaattaatataaatcagcaacttaaatagcctctaaggttttaagttttataagaaaaaaaagaatatataaggcttttaaaggttttaaggtttcctaggttatcctcatatgagctcttagaaaaactcatccagcatcaaatgaaactgcaatttattcatatcaggattatcaataccatatttttgaaaaagtcttttctgtaatgaaggagaaaactcacccaggcagttccataggatggcaagatcctggtatctgtctgcaattccaactcttccaacatcaatacaacctattaatttcccctcatcaaaaataaggttatcaagtgagaaatcaccatgagtgaccactgaatctggtgagaatggcaaaagattatgcatttctttccagacttgttcaacaggccagccatttctctcatcatcaaaatcactggcatcaaccaaaccattattcattcttgattgggcctgagccagtctaaatactctatcagagttaaaaggacaattacaaacaggaatggaatgcaatcttctcaggaacactgccagggcatcaacaatattttcacctgaatcaggatattcttccaatacctggaatgctgttttccctgggatggcagtggtgagtaaccatgcatcatcaggagttctgataaaatgcttgatggttggaagaggcataaattcagtcagccagtttagtctgaccatctcatctgtaacatcattggcaacagaacctttgccatgtttcagaaacaactctggggcatctggcttcccatacaatctatagattgtggcacctgattgcccaacattatctctagcccatttatacccatataaatcagcatccatgttggaatttaatcttggcctggagcaagaggtttctctttgaatatggctcatacatgtgcacctcctatagtgagttgtattatactatgcagatatactatgccaatgtttaattgtcag

SEQ ID NO: 24 - DNA, 6271 bp, synthetic construct
  source 1..6271: mol_type = other DNA; note = Synthetic
cactatgtgttaattaaaattatctctaaggcatgtgaactggctgtcttggttttcatctgtacttcatctgctacctctgtgacctgaaacatatttataattccattaagctgtgcatatgatagatttatcatatgtattttccttaaaggatttttgtaagaactaattgaattgatacctgtaaagtctttatcacactacccaataaataataaatctctttgttcagctctctgtttctataaatatgtaccagttttattgtttttagtggtagtgattttattctctttctatatatatacacacacatgtgtgcattcataaatatatacaatttttatgaataaaaaattattagcaatcaatattgaaaaccactgatttttgtttatgtgagcaaacagcagattaaaaggaatttgaattctcatagctagcaggagtcaatgggaaaaacccattggagccaagtacactgactcaatagggactttccattgggttttgcccagtacataaggtcaatagggggtgagtcaacaggaaagtcccattggagccaagtacattgagtcaatagggactttccaatgggttttgcccagtacataaggtcaatgggaggtaagccaatgggtttttcccattactgacatgtatactgagtcattagggactttccaatgggttttgcccagtacataaggtcaataggggtgaatcaacaggaaagtcccattggagccaagtacactgagtcaatagggactttccattgggttttgcccagtacaaaaggtcaatagggggtgagtcaatgggtttttcccattattggcacatacataaggtcaataggggtgactagtggagaagagcatgcttgagggctgagtgcccctcagtgggcagagagcacatggcccacagtccctgagaagttggggggaggggtgggcaattgaactggtgcctagagaaggtggggcttgggtaaactgggaaagtgatgtggtgtactggctccacctttttccccagggtgggggagaaccatatataagtgcagtagtctctgtgaacattcaagcttctgccttctccctcctgtgagtttggtaagtcactgactgtctatgcctgggaaagggtgggcaggagatggggcagtgcaggaaaagtggcactatgaaccctgcagccctagacaattgtactaaccttcttctctttcctctcctgacaggttggtaaccaagccaccatgagcagcagctcttggctgctgctgagtctggtggctgtgacagctgcccagagcaccattgaggaacaggccaagtacttcctggacaagttcaaccatgaggctgaggacctgttctaccagagcagcctggccagctggaactacaacaccaacatcactgaagagaatgtgcagaacatgaacaatgctggggacaagtggagtgccttcctgaaagagcagagcacaactgcccagatgtaccctctgcaagagatccagaacctgacagtgaagctccagctccaggctctccagcagaatggcagctctgtgctgtctgaggacaagagcaagagactgaacaccatcctgaacacaatgagcaccatctacagcacaggcaaagtgtgcaaccctgacaaccctcaagagtgcctgctgctggaacctggcctgaatgagatcatggccaacagcctggactacaatgagagactgtgggcctgggagtcttggaggagtgaagtgggaaagcagctgaggcccctgtatgaggaatatgtggtgctgaagaatgagatggccagggccaaccactatgaggactatggggattattggaggggagactatgaagtgaatggtgttgatggctatgactacagcaggggccagctgattgaggatgtggaacacacctttgaggaaatcaagcccctctatgagcacctccatgcctatgtcagagccaagctgatgaatgcttaccccagctacatcagccccattggctgcctgcctgctcatctgctgggagacatgtggggcagattctggaccaacctgtacagcctgactgtgccctttggccagaaacctaacattgatgtgacagatgccatggtggatcaggcctgggatgcccagagaatcttcaaagaggctgagaagttctttgtgtctgtggggctgcccaacatgacccaaggcttttgggagtactccatgctgacagaccctggcaatgtgcaaaaggctgtgtgtcaccccacagcctgggaccttggcaagggagacttcagaatcctgatgtgcaccaaagtgacaatggatgactttctgacagctcaccatgagatgggccacatccagtatgacatggcctatgctgcccagcctttcctgctgagaaatggggccaatgagggcttccatgaggcagtgggagagatcatgagcctgtctgctgccacacctaagcacctgaagtccattggcctgctgagccctgacttccaagaggacaatgagacagagatcaacttcctgctcaagcaggccctgaccattgtgggcacactgcccttcacctacatgctggaaaagtggagatggatggtctttaagggagaaatccccaaggaccagtggatgaagaaatggtgggagatgaagagggaaattgtgggagttgtggaacctgtgccacatgatgagacatactgtgaccctgccagcctgttccatgtgtccaatgactactccttcattaggtactacaccaggacactgtaccagttccagtttcaagaggctctgtgtcaggctgctaaacatgagggcccactgcacaagtgtgacatcagcaactccacagaggctggacagaaactgttcaacatgctgagactgggcaagtctgagccttggactctggccctggaaaatgttgtgggagccaagaatatgaatgtcagacccctgctgaactactttgagcccctgttcacctggctgaaggaccagaacaagaacagctttgttggctggtccacagactggtccccatatgctgaccagagcatcaaagtcagaatcagcctgaagagtgccctgggagataaggcctatgagtggaatgataatgagatgtacctgttcaggtcctctgtggcttatgctatgagacagtactttctgaaagtgaagaaccagatgatcctgtttggagaagaggatgtcagagtggccaacctgaagcctagaatcagcttcaacttctttgtgacagcccctaagaatgtgtctgacatcatccccagaacagaggtggaaaaggccatcagaatgagcaggtccaggatcaatgatgccttcaggctcaatgacaactccctggaatttctgggcattcagcccacactgggccctccaaatcagcctcctgtgtctggtggaggaggtagtgagcccaagagctgtgacaagacccacacctgtcctccatgtcctgctccagaggctgctggaggaccttctgtgtttctgttccctccaaagccaaaggacaccctgatgatcagcagaacccctgaagtgacctgtgtggtggtggatgtgtcccatgaggacccagaagtgaagttcaattggtatgtggatggtgttgaggtgcacaatgccaagaccaagcctagagaggaacagtacaacagcacctacagggttgtgtcagtgctgactgtgctgcaccaggactggctgaatggcaaagagtacaagtgcaaggtgtccaacaaggccctgcctgctcctattgaaaagaccatcagcaaggccaagggacagcctagggaaccccaggtgtacacactgccacctagcagagatgagctgaccaagaatcaggtgtccctgacatgccttgtgaagggcttctacccttctgacattgcagtggaatgggagagcaatggccagcctgagaacaactacaagacaacccctcctgtgctggactctgatggctcattcttcctgtactccaagctgacagtggacaagtccagatggcagcaaggcaatgtgttcagctgctctgtgatgcatgaggccctgcacaaccactacacacagaagtccctgtctctgagccctggcaagtgaagatctacttctggctaataaaagatcagagctctagtgatctgtgtgttggttttttgtgtctgcattctagcaagtcaatatgttcaccccaaaaaagctgtttgttaacttgtcaacctcattctaaaatgtatatagaagcccaaaagacaataacaaaaatattcttgtagaacaaaatgggaaagaatgttccactaaatatcaagatttagagcaaagcatgagatgtgtggggatagacagtgaggctgataaaatagagtagagctcagaaacagacccattgatatatgtaagtgacctatgaaaaaaatatggcattttacaatgggaaaatgatggtctttttcttttttagaaaaacagggaaatatatttatatgtaaaaaataaaagggaacccatatgtcataccatacacacaaaaaaattccagtgaattataagtctaaatggagaaggcaaaactttaaatcttttagaaaataatatagaagcatgccatcaagacttcagtgtagagaaaaatttcttatgactcaaagtcctaaccacaaagaaaagattgttaattagattgcatgaatattaagacttatttttaaaattaaaaaaccattaagaaaagtcaggccatagaatgacagaaaatatttgcaacaccccagtaaagagaattgtaatatgcagattataaaaagaagtcttacaaatcagtaaaaaataaaactagacaaaaatttgaacagatgaaagagaaactctaaataatcattacacatgagaaactcaatctcagaaatcagagaactatcattgcatatacactaaattagagaaatattaaaaggctaagtaacatctgtggcttaattaatctagctctagtgatcagcagttcaacctgttgatagtatgtactaagctctcatgtttaatgtactaagctctcatgtttaatgaactaaaccctcatggctaatgtactaagctctcatggctaatgtactaagctctcatgtttcatgtactaagctctcatgtttgaacaataaaattaatataaatcagcaacttaaatagcctctaaggttttaagttttataagaaaaaaaagaatatataaggcttttaaaggttttaaggtttcctaggttatcctcatatgagctcttagaaaaactcatccagcatcaaatgaaactgcaatttattcatatcaggattatcaataccatatttttgaaaaagtcttttctgtaatgaaggagaaaactcacccaggcagttccataggatggcaagatcctggtatctgtctgcaattccaactcttccaacatcaatacaacctattaatttcccctcatcaaaaataaggttatcaagtgagaaatcaccatgagtgaccactgaatctggtgagaatggcaaaagattatgcatttctttccagacttgttcaacaggccagccatttctctcatcatcaaaatcactggcatcaaccaaaccattattcattcttgattgggcctgagccagtctaaatactctatcagagttaaaaggacaattacaaacaggaatggaatgcaatcttctcaggaacactgccagggcatcaacaatattttcacctgaatcaggatattcttccaatacctggaatgctgttttccctgggatggcagtggtgagtaaccatgcatcatcaggagttctgataaaatgcttgatggttggaagaggcataaattcagtcagccagtttagtctgaccatctcatctgtaacatcattggcaacagaacctttgccatgtttcagaaacaactctggggcatctggcttcccatacaatctatagattgtggcacctgattgcccaacattatctctagcccatttatacccatataaatcagcatccatgttggaatttaatcttggcctggagcaagaggtttctctttgaatatggctcatacatgtgcacctcctatagtgagttgtattatactatgcagatatactatgccaatgtttaattgtcag

SEQ ID NO: 25 - DNA, 9747 bp, synthetic construct
  source 1..9747: mol_type = other DNA; note = Synthetic
cactatgtgttaattaaaattatctctaaggcatgtgaactggctgtcttggttttcatctgtacttcatctgctacctctgtgacctgaaacatatttataattccattaagctgtgcatatgatagatttatcatatgtattttccttaaaggatttttgtaagaactaattgaattgatacctgtaaagtctttatcacactacccaataaataataaatctctttgttcagctctctgtttctataaatatgtaccagttttattgtttttagtggtagtgattttattctctttctatatatatacacacacatgtgtgcattcataaatatatacaatttttatgaataaaaaattattagcaatcaatattgaaaaccactgatttttgtttatgtgagcaaacagcagattaaaaggaatttgaattctcatagctagcaggagtcaatgggaaaaacccattggagccaagtacactgactcaatagggactttccattgggttttgcccagtacataaggtcaatagggggtgagtcaacaggaaagtcccattggagccaagtacattgagtcaatagggactttccaatgggttttgcccagtacataaggtcaatgggaggtaagccaatgggtttttcccattactgacatgtatactgagtcattagggactttccaatgggttttgcccagtacataaggtcaataggggtgaatcaacaggaaagtcccattggagccaagtacactgagtcaatagggactttccattgggttttgcccagtacaaaaggtcaatagggggtgagtcaatgggtttttcccattattggcacatacataaggtcaataggggtgactagtggagaagagcatgcttgagggctgagtgcccctcagtgggcagagagcacatggcccacagtccctgagaagttggggggaggggtgggcaattgaactggtgcctagagaaggtggggcttgggtaaactgggaaagtgatgtggtgtactggctccacctttttccccagggtgggggagaaccatatataagtgcagtagtctctgtgaacattcaagcttctgccttctccctcctgtgagtttggtaagtcactgactgtctatgcctgggaaagggtgggcaggagatggggcagtgcaggaaaagtggcactatgaaccctgcagccctagacaattgtactaaccttcttctctttcctctcctgacaggttggtaaccaagccaccatgagcagcagctcttggctgctgctgagtctggtggctgtgacagctgcccagagcaccattgaggaacaggccaagaccttcctggacaagttcaaccatgaggctgaggacctgttctaccagagcagcctggccagctggaactacaacaccaacatcactgaagagaatgtgcagaacatgaacaatgctggggacaagtggagtgccttcctgaaagagcagagcacactggcccagatgtaccctctgcaagagatccagaacctgacagtgaagctccagctccaggctctccagcagaatggcagctctgtgctgtctgaggacaagagcaagagactgaacaccatcctgaacacaatgagcaccatctacagcacaggcaaagtgtgcaaccctgacaaccctcaagagtgcctgctgctggaacctggcctgaatgagatcatggccaacagcctggactacaatgagagactgtgggcctgggagtcttggaggagtgaagtgggaaagcagctgaggcccctgtatgaggaatatgtggtgctgaagaatgagatggccagggccaaccactatgaggactatggggattattggaggggagactatgaagtgaatggtgttgatggctatgactacagcaggggccagctgattgaggatgtggaacacacctttgaggaaatcaagcccctctatgagcacctccatgcctatgtcagagccaagctgatgaatgcttaccccagctacatcagccccattggctgcctgcctgctcatctgctgggagacatgtggggcagattctggaccaacctgtacagcctgactgtgccctttggccagaaacctaacattgatgtgacagatgccatggtggatcaggcctgggatgcccagagaatcttcaaagaggctgagaagttctttgtgtctgtggggctgcccaacatgacccaaggcttttgggagaactccatgctgacagaccctggcaatgtgcaaaaggctgtgtgtcaccccacagcctgggaccttggcaagggagacttcagaatcctgatgtgcaccaaagtgacaatggatgactttctgacagctcaccatgagatgggccacatccagtatgacatggcctatgctgcccagcctttcctgctgagaaatggggccaatgagggcttccatgaggcagtgggagagatcatgagcctgtctgctgccacacctaagcacctgaagtccattggcctgctgagccctgacttccaagaggacaatgagacagagatcaacttcctgctcaagcaggccctgaccattgtgggcacactgcccttcacctacatgctggaaaagtggagatggatggtctttaagggagaaatccccaaggaccagtggatgaagaaatggtgggagatgaagagggaaattgtgggagttgtggaacctgtgccacatgatgagacatactgtgaccctgccagcctgttccatgtgtccaatgactactccttcattaggtactacaccaggacactgtaccagttccagtttcaagaggctctgtgtcaggctgctaaacatgagggcccactgcacaagtgtgacatcagcaactccacagaggctggacagaaactgttcaacatgctgagactgggcaagtctgagccttggactctggccctggaaaatgttgtgggagccaagaatatgaatgtcagacccctgctgaactactttgagcccctgttcacctggctgaaggaccagaacaagaacagctttgttggctggtccacagactggtccccatatgctgaccagagcatcaaagtcagaatcagcctgaagagtgccctgggagataaggcctatgagtggaatgataatgagatgtacctgttcaggtcctctgtggcttatgctatgagacagtactttctgaaagtgaagaaccagatgatcctgtttggagaagaggatgtcagagtggccaacctgaagcctagaatcagcttcaacttctttgtgacagcccctaagaatgtgtctgacatcatccccagaacagaggtggaaaaggccatcagaatgagcaggtccaggatcaatgatgccttcaggctcaatgacaactccctggaatttctgggcattcagcccacactgggccctccaaatcagcctcctgtgtcctaaagatctacttctggctaataaaagatcagagctctagtgatctgtgtgttggttttttgtgtctgcattctagcagagccccactgtgttcatcttacagatggaaatactgacattcagaggagttagttaacttgcctaggtgattcagctaataagtgcaagaaagatttcaatccaaggtgatttgattctgaagcctgtgctaatcacattacaccaagctacaacttcatttataaataataagtcagctttcaagggcctttcaggtgtcctgcacttctacaagctgtgccatttagtgaacacaaaatgagccttctgatgaagtagtcttttcattatttcagatattagaacactaaaattcttagctgccagctgattgaaggctgggacaaaattcaaacatgcatctacaacaatatatatctcaatgttagtctccaaattctattgacttcaactcaagagaatataaagagctagtctttatacactctttaaggtatgatatcatctggaaagtaacaaaattgatgcaaatttgaatgaactttatcatggtgtatttacacaatgtgtttcttctccctgcaatgtatttctttctctaattccttccatttgatctttcatacacaatctggttctgatgtatgttttttggatgcacttttcaactccaaaagacagagctagttactttcttcctggtgctccaagcactgtatttgtatctgtattcaagccctttgcaatattgtactggatcattatttcacctctaggatggcttccccaggcaacttgtgttcacccagagactacattttgtatcttgttgacctttgaacttccaccagtgtctaaaaataatatgtatgcaaaattacttgctatgagaatgtataattaaacaatataaaaaggagaagcaaggagagaaacacaggtgtgtatttgtgtttgtgtgcttaaaaggcagtgtggaaaaggaagaaatgccatttatagtgaggagacaaagttatattacctcttatctggcttttaaggagattttgctgagctaaaaatcctatattcatagaaaagccttacctgagttgccaatacctcaattcagtctagcaggagtcaatgggaaaaacccattggagccaagtacactgactcaatagggactttccattgggttttgcccagtacataaggtcaatagggggtgagtcaacaggaaagtcccattggagccaagtacattgagtcaatagggactttccaatgggttttgcccagtacataaggtcaatgggaggtaagccaatgggtttttcccattactgacatgtatactgagtcattagggactttccaatgggttttgcccagtacataaggtcaataggggtgaatcaacaggaaagtcccattggagccaagtacactgagtcaatagggactttccattgggttttgcccagtacaaaaggtcaatagggggtgagtcaatgggtttttcccattattggcacatacataaggtcaataggggtgactagtggagaagagcatgcttgagggctgagtgcccctcagtgggcagagagcacatggcccacagtccctgagaagttggggggaggggtgggcaattgaactggtgcctagagaaggtggggcttgggtaaactgggaaagtgatgtggtgtactggctccacctttttccccagggtgggggagaaccatatataagtgcagtagtctctgtgaacattcaagcttctgccttctccctcctgtgagtttggtaagtcactgactgtctatgcctgggaaagggtgggcaggagatggggcagtgcaggaaaagtggcactatgaaccctgcagccctagacaattgtactaaccttcttctctttcctctcctgacaggttggtaaccaagccaccatgagcagcagctcttggctgctgctgagtctggtggctgtgacagctgcccagagcaccattgaggaacaggccaagaccttcctggacaagttcaaccatgaggctgaggacctgttctaccagagcagcctggccagctggaactacaacaccaacatcactgaagagaatgtgcagaacatgaacaatgctggggacaagtggagtgccttcctgaaagagcagagcacactggcccagatgtaccctctgcaagagatccagaacctgacagtgaagctccagctccaggctctccagcagaatggcagctctgtgctgtctgaggacaagagcaagagactgaacaccatcctgaacacaatgagcaccatctacagcacaggcaaagtgtgcaaccctgacaaccctcaagagtgcctgctgctggaacctggcctgaatgagatcatggccaacagcctggactacaatgagagactgtgggcctgggagtcttggaggagtgaagtgggaaagcagctgaggcccctgtatgaggaatatgtggtgctgaagaatgagatggccagggccaaccactatgaggactatggggattattggaggggagactatgaagtgaatggtgttgatggctatgactacagcaggggccagctgattgaggatgtggaacacacctttgaggaaatcaagcccctctatgagcacctccatgcctatgtcagagccaagctgatgaatgcttaccccagctacatcagccccattggctgcctgcctgctcatctgctgggagacatgtggggcagattctggaccaacctgtacagcctgactgtgccctttggccagaaacctaacattgatgtgacagatgccatggtggatcaggcctgggatgcccagagaatcttcaaagaggctgagaagttctttgtgtctgtggggctgcccaacatgacccaaggcttttgggagaactccatgctgacagaccctggcaatgtgcaaaaggctgtgtgtcaccccacagcctgggaccttggcaagggagacttcagaatcctgatgtgcaccaaagtgacaatggatgactttctgacagctcaccatgagatgggccacatccagtatgacatggcctatgctgcccagcctttcctgctgagaaatggggccaatgagggcttccatgaggcagtgggagagatcatgagcctgtctgctgccacacctaagcacctgaagtccattggcctgctgagccctgacttccaagaggacaatgagacagagatcaacttcctgctcaagcaggccctgaccattgtgggcacactgcccttcacctacatgctggaaaagtggagatggatggtctttaagggagaaatccccaaggaccagtggatgaagaaatggtgggagatgaagagggaaattgtgggagttgtggaacctgtgccacatgatgagacatactgtgaccctgccagcctgttccatgtgtccaatgactactccttcattaggtactacaccaggacactgtaccagttccagtttcaagaggctctgtgtcaggctgctaaacatgagggcccactgcacaagtgtgacatcagcaactccacagaggctggacagaaactgttcaacatgctgagactgggcaagtctgagccttggactctggccctggaaaatgttgtgggagccaagaatatgaatgtcagacccctgctgaactactttgagcccctgttcacctggctgaaggaccagaacaagaacagctttgttggctggtccacagactggtccccatatgctgaccagagcatcaaagtcagaatcagcctgaagagtgccctgggagataaggcctatgagtggaatgataatgagatgtacctgttcaggtcctctgtggcttatgctatgagacagtactttctgaaagtgaagaaccagatgatcctgtttggagaagaggatgtcagagtggccaacctgaagcctagaatcagcttcaacttctttgtgacagcccctaagaatgtgtctgacatcatccccagaacagaggtggaaaaggccatcagaatgagcaggtccaggatcaatgatgccttcaggctcaatgacaactccctggaatttctgggcattcagcccacactgggccctccaaatcagcctcctgtgtcctaaagatctacttctggctaataaaagatcagagctctagtgatctgtgtgttggttttttgtgtctgcattctagcaagtcaatatgttcaccccaaaaaagctgtttgttaacttgtcaacctcattctaaaatgtatatagaagcccaaaagacaataacaaaaatattcttgtagaacaaaatgggaaagaatgttccactaaatatcaagatttagagcaaagcatgagatgtgtggggatagacagtgaggctgataaaatagagtagagctcagaaacagacccattgatatatgtaagtgacctatgaaaaaaatatggcattttacaatgggaaaatgatggtctttttcttttttagaaaaacagggaaatatatttatatgtaaaaaataaaagggaacccatatgtcataccatacacacaaaaaaattccagtgaattataagtctaaatggagaaggcaaaactttaaatcttttagaaaataatatagaagcatgccatcaagacttcagtgtagagaaaaatttcttatgactcaaagtcctaaccacaaagaaaagattgttaattagattgcatgaatattaagacttatttttaaaattaaaaaaccattaagaaaagtcaggccatagaatgacagaaaatatttgcaacaccccagtaaagagaattgtaatatgcagattataaaaagaagtcttacaaatcagtaaaaaataaaactagacaaaaatttgaacagatgaaagagaaactctaaataatcattacacatgagaaactcaatctcagaaatcagagaactatcattgcatatacactaaattagagaaatattaaaaggctaagtaacatctgtggcttaattaatctagctctagtgatcagcagttcaacctgttgatagtatgtactaagctctcatgtttaatgtactaagctctcatgtttaatgaactaaaccctcatggctaatgtactaagctctcatggctaatgtactaagctctcatgtttcatgtactaagctctcatgtttgaacaataaaattaatataaatcagcaacttaaatagcctctaaggttttaagttttataagaaaaaaaagaatatataaggcttttaaaggttttaaggtttcctaggttatcctcatatgagctcttagaaaaactcatccagcatcaaatgaaactgcaatttattcatatcaggattatcaataccatatttttgaaaaagtcttttctgtaatgaaggagaaaactcacccaggcagttccataggatggcaagatcctggtatctgtctgcaattccaactcttccaacatcaatacaacctattaatttcccctcatcaaaaataaggttatcaagtgagaaatcaccatgagtgaccactgaatctggtgagaatggcaaaagattatgcatttctttccagacttgttcaacaggccagccatttctctcatcatcaaaatcactggcatcaaccaaaccattattcattcttgattgggcctgagccagtctaaatactctatcagagttaaaaggacaattacaaacaggaatggaatgcaatcttctcaggaacactgccagggcatcaacaatattttcacctgaatcaggatattcttccaatacctggaatgctgttttccctgggatggcagtggtgagtaaccatgcatcatcaggagttctgataaaatgcttgatggttggaagaggcataaattcagtcagccagtttagtctgaccatctcatctgtaacatcattggcaacagaacctttgccatgtttcagaaacaactctggggcatctggcttcccatacaatctatagattgtggcacctgattgcccaacattatctctagcccatttatacccatataaatcagcatccatgttggaatttaatcttggcctggagcaagaggtttctctttgaatatggctcatacatgtgcacctcctatagtgagttgtattatactatgcagatatactatgccaatgtttaattgtcag

SEQ ID NO: 26 - DNA, 9711 bp, synthetic construct
  source 1..9711: mol_type = other DNA; note = Synthetic
cactatgtgttaattaaaattatctctaaggcatgtgaactggctgtcttggttttcatctgtacttcatctgctacctctgtgacctgaaacatatttataattccattaagctgtgcatatgatagatttatcatatgtattttccttaaaggatttttgtaagaactaattgaattgatacctgtaaagtctttatcacactacccaataaataataaatctctttgttcagctctctgtttctataaatatgtaccagttttattgtttttagtggtagtgattttattctctttctatatatatacacacacatgtgtgcattcataaatatatacaatttttatgaataaaaaattattagcaatcaatattgaaaaccactgatttttgtttatgtgagcaaacagcagattaaaaggaatttgaattctcatagctagcaggagtcaatgggaaaaacccattggagccaagtacactgactcaatagggactttccattgggttttgcccagtacataaggtcaatagggggtgagtcaacaggaaagtcccattggagccaagtacattgagtcaatagggactttccaatgggttttgcccagtacataaggtcaatgggaggtaagccaatgggtttttcccattactgacatgtatactgagtcattagggactttccaatgggttttgcccagtacataaggtcaataggggtgaatcaacaggaaagtcccattggagccaagtacactgagtcaatagggactttccattgggttttgcccagtacaaaaggtcaatagggggtgagtcaatgggtttttcccattattggcacatacataaggtcaataggggtgactagtggagaagagcatgcttgagggctgagtgcccctcagtgggcagagagcacatggcccacagtccctgagaagttggggggaggggtgggcaattgaactggtgcctagagaaggtggggcttgggtaaactgggaaagtgatgtggtgtactggctccacctttttccccagggtgggggagaaccatatataagtgcagtagtctctgtgaacattcaagcttctgccttctccctcctgtgagtttggtaagtcactgactgtctatgcctgggaaagggtgggcaggagatggggcagtgcaggaaaagtggcactatgaaccctgcagccctagacaattgtactaaccttcttctctttcctctcctgacaggttggtaaccaagccaccatgagcagcagctcttggctgctgctgagtctggtggctgtgacagctgcccagagcaccattgaggaacaggccaagaccttcctggacaagttcaaccatgaggctgaggacctgttctaccagagcagcctggccagctggaactacaacaccaacatcactgaagagaatgtgcagaacatgaacaatgctggggacaagtggagtgccttcctgaaagagcagagcacactggcccagatgtaccctctgcaagagatccagaacctgacagtgaagctccagctccaggctctccagcagaatggcagctctgtgctgtctgaggacaagagcaagagactgaacaccatcctgaacacaatgagcaccatctacagcacaggcaaagtgtgcaaccctgacaaccctcaagagtgcctgctgctggaacctggcctgaatgagatcatggccaacagcctggactacaatgagagactgtgggcctgggagtcttggaggagtgaagtgggaaagcagctgaggcccctgtatgaggaatatgtggtgctgaagaatgagatggccagggccaaccactatgaggactatggggattattggaggggagactatgaagtgaatggtgttgatggctatgactacagcaggggccagctgattgaggatgtggaacacacctttgaggaaatcaagcccctctatgagcacctccatgcctatgtcagagccaagctgatgaatgcttaccccagctacatcagccccattggctgcctgcctgctcatctgctgggagacatgtggggcagattctggaccaacctgtacagcctgactgtgccctttggccagaaacctaacattgatgtgacagatgccatggtggatcaggcctgggatgcccagagaatcttcaaagaggctgagaagttctttgtgtctgtggggctgcccaacatgacccaaggcttttgggagaactccatgctgacagaccctggcaatgtgcaaaaggctgtgtgtcaccccacagcctgggaccttggcaagggagacttcagaatcctgatgtgcaccaaagtgacaatggatgactttctgacagctcaccatgagatgggccacatccagtatgacatggcctatgctgcccagcctttcctgctgagaaatggggccaatgagggcttccatgaggcagtgggagagatcatgagcctgtctgctgccacacctaagcacctgaagtccattggcctgctgagccctgacttccaagaggacaatgagacagagatcaacttcctgctcaagcaggccctgaccattgtgggcacactgcccttcacctacatgctggaaaagtggagatggatggtctttaagggagaaatccccaaggaccagtggatgaagaaatggtgggagatgaagagggaaattgtgggagttgtggaacctgtgccacatgatgagacatactgtgaccctgccagcctgttccatgtgtccaatgactactccttcattaggtactacaccaggacactgtaccagttccagtttcaagaggctctgtgtcaggctgctaaacatgagggcccactgcacaagtgtgacatcagcaactccacagaggctggacagaaactgttcaacatgctgagactgggcaagtctgagccttggactctggccctggaaaatgttgtgggagccaagaatatgaatgtcagacccctgctgaactactttgagcccctgttcacctggctgaaggaccagaacaagaacagctttgttggctggtccacagactggtccccatatgctgaccagagcatcaaagtcagaatcagcctgaagagtgccctgggagataaggcctatgagtggaatgataatgagatgtacctgttcaggtcctctgtggcttatgctatgagacagtactttctgaaagtgaagaaccagatgatcctgtttggagaagaggatgtcagagtggccaacctgaagcctagaatcagcttcaacttctttgtgacagcccctaagaatgtgtctgacatcatccccagaacagaggtggaaaaggccatcagaatgagcaggtccaggatcaatgatgccttcaggctcaatgacaactccctggaatttctgggcattcagcccacactgggccctccaaatcagcctcctgtgtcctaaagatctacttctggctaataaaagatcagagctctagtgatctgtgtgttggttttttgtgtctgcattctagcagagccccactgtgttcatcttacagatggaaatactgacattcagaggagttagttaacttgcctaggtgattcagctaataagtgcaagaaagatttcaatccaaggtgatttgattctgaagcctgtgctaatcacattacaccaagctacaacttcatttataaataataagtcagctttcaagggcctttcaggtgtcctgcacttctacaagctgtgccatttagtgaacacaaaatgagccttctgatgaagtagtcttttcattatttcagatattagaacactaaaattcttagctgccagctgattgaaggctgggacaaaattcaaacatgcatctacaacaatatatatctcaatgttagtctccaaattctattgacttcaactcaagagaatataaagagctagtctttatacactctttaaggtatgatatcatctggaaagtaacaaaattgatgcaaatttgaatgaactttatcatggtgtatttacacaatgtgtttcttctccctgcaatgtatttctttctctaattccttccatttgatctttcatacacaatctggttctgatgtatgttttttggatgcacttttcaactccaaaagacagagctagttactttcttcctggtgctccaagcactgtatttgtatctgtattcaagccctttgcaatattgtactggatcattatttcacctctaggatggcttccccaggcaacttgtgttcacccagagactacattttgtatcttgttgacctttgaacttccaccagtgtctaaaaataatatgtatgcaaaattacttgctatgagaatgtataattaaacaatataaaaaggagaagcaaggagagaaacacaggtgtgtatttgtgtttgtgtgcttaaaaggcagtgtggaaaaggaagaaatgccatttatagtgaggagacaaagttatattacctcttatctggcttttaaggagattttgctgagctaaaaatcctatattcatagaaaagccttacctgagttgccaatacctcaattcagtctagcaggagtcaatgggaaaaacccattggagccaagtacactgactcaatagggactttccattgggttttgcccagtacataaggtcaatagggggtgagtcaacaggaaagtcccattggagccaagtacattgagtcaatagggactttccaatgggttttgcccagtacataaggtcaatgggaggtaagccaatgggtttttcccattactgacatgtatactgagtcattagggactttccaatgggttttgcccagtacataaggtcaataggggtgaatcaacaggaaagtcccattggagccaagtacactgagtcaatagggactttccattgggttttgcccagtacaaaaggtcaatagggggtgagtcaatgggtttttcccattattggcacatacataaggtcaataggggtgactagtggagaagagcatgcttgagggctgagtgcccctcagtgggcagagagcacatggcccacagtccctgagaagttggggggaggggtgggcaattgaactggtgcctagagaaggtggggcttgggtaaactgggaaagtgatgtggtgtactggctccacctttttccccagggtgggggagaaccatatataagtgcagtagtctctgtgaacattcaagcttctgccttctccctcctgtgagtttggtaagtcactgactgtctatgcctgggaaagggtgggcaggagatggggcagtgcaggaaaagtggcactatgaaccctgcagccctagacaattgtactaaccttcttctctttcctctcctgacaggttggtaaccaagccaccatgggatggtccctgatcctgctgtttctggtggctgtggccaccagagtgctgtctgaagtgcagctggtggaaagtggtggtggcctggttcagcctggtggctctctgagactgagctgtgctgcctctggcttcattgtgtccagcaactacatgagctgggtcagacaggcccctggcaaaggactggaatgggtgtcagtgatctacagtggtggcagcacctactatgctgactctgtgaagggcagattcaccatcagcagacacaacagcaagaacaccctgtacctgcagatgaacagcctgagagctgaggacactgctgtgtactactgtgccagagaagcctatggcatggatgtgtggggccagggcacaacagtgactgtgtcctctgccagcacaaagggcccctctgtgtttcctctggctcccagcagcaagagcaccagtggtggaacagctgccctgggctgtctggtcaaggactactttcctgagcctgtgacagtgtcctggaactctggggctctgacatctggggtgcacacattccctgcagtgctgcagtcctctggcctgtacagcctgtcctctgtggtcacagtgcctagctctagcctgggcacccagacctacatctgcaatgtgaaccacaagcctagcaacaccaaggtggacaagaaggctgagcccaagagctgtgacaagacccacacctgtcctccatgtcctgctccagagctgcttggaggaccatcagtgtttctgttccctccaaagcctaaggacaccctgatgatcagcagaacccctgaagtgacctgtgtggtggttgatgtgtcccatgaggacccagaagtgaagttcaattggtatgtggatggtgttgaggtgcacaatgccaagaccaagcctagagaggaacagtacaactccacctacagagtggtttctgtgctgacagtgctccaccaggactggctgaatggcaaagagtacaagtgcaaggtgtccaacaaggccctgcctgctcctattgaaaagaccatctccaaggccaagggccagcctagggaaccccaggtttacacactgccacctagcagggatgagctgaccaagaaccaggtgtccctgacatgcctggttaagggcttctacccctctgacattgctgtggaatgggagagcaatggccagccagagaacaactacaagacaacccctcctgtgctggactctgatggctcattcttcctgtactccaagctgactgtggacaagtccagatggcagcagggcaatgtctttagctgctctgtgatgcatgaggccctgcacaaccactacacacagaagtccctgtctctgagccctggcaagagaaagagaaggagtggctctggggccaccaacttcagcctgctgaaacaggctggggatgttgaagagaaccctggacctatggacttccaggtgcagatcatcagctttctgcttatctctgccagtgtgatcatgagcaggggagacattgtgatgacccagtctccatccttcctgagtgcctctgtgggagacagagtgaccatcacctgtagagccagccagggcatcagctcttacctggcttggtatcagcaaaagcctggcaaggcccctaagctgctgatctatgctgcctccacactgcagtcaggggtgccctccagattttctggctctggatctggcactgagttcaccctgaccatcagctccctgcagcctgaggactttgccacctactactgccagcagctgaacagctaccctccttacacctttggacagggcaccaagctggaaatcaagaggacagtggctgctccttctgtgttcatcttcccaccatcagatgaacagctgaagagtggcacagcctctgttgtgtgcctgctcaacaacttctaccctagagaagccaaggtgcagtggaaagtggacaatgccctccagtctggcaacagccaagaatctgtgactgagcaggactccaaggacagcacatacagcctgagcagcacactgaccctgagcaaggctgactatgagaagcacaaagtctatgcctgtgaagtgacacaccagggcctgtctagcccagtgaccaagtccttcaacaggggagagtgttgaagatctacttctggctaataaaagatcagagctctagtgatctgtgtgttggttttttgtgtctgcattctagcaagtcaatatgttcaccccaaaaaagctgtttgttaacttgtcaacctcattctaaaatgtatatagaagcccaaaagacaataacaaaaatattcttgtagaacaaaatgggaaagaatgttccactaaatatcaagatttagagcaaagcatgagatgtgtggggatagacagtgaggctgataaaatagagtagagctcagaaacagacccattgatatatgtaagtgacctatgaaaaaaatatggcattttacaatgggaaaatgatggtctttttcttttttagaaaaacagggaaatatatttatatgtaaaaaataaaagggaacccatatgtcataccatacacacaaaaaaattccagtgaattataagtctaaatggagaaggcaaaactttaaatcttttagaaaataatatagaagcatgccatcaagacttcagtgtagagaaaaatttcttatgactcaaagtcctaaccacaaagaaaagattgttaattagattgcatgaatattaagacttatttttaaaattaaaaaaccattaagaaaagtcaggccatagaatgacagaaaatatttgcaacaccccagtaaagagaattgtaatatgcagattataaaaagaagtcttacaaatcagtaaaaaataaaactagacaaaaatttgaacagatgaaagagaaactctaaataatcattacacatgagaaactcaatctcagaaatcagagaactatcattgcatatacactaaattagagaaatattaaaaggctaagtaacatctgtggcttaattaatctagctctagtgatcagcagttcaacctgttgatagtatgtactaagctctcatgtttaatgtactaagctctcatgtttaatgaactaaaccctcatggctaatgtactaagctctcatggctaatgtactaagctctcatgtttcatgtactaagctctcatgtttgaacaataaaattaatataaatcagcaacttaaatagcctctaaggttttaagttttataagaaaaaaaagaatatataaggcttttaaaggttttaaggtttcctaggttatcctcatatgagctcttagaaaaactcatccagcatcaaatgaaactgcaatttattcatatcaggattatcaataccatatttttgaaaaagtcttttctgtaatgaaggagaaaactcacccaggcagttccataggatggcaagatcctggtatctgtctgcaattccaactcttccaacatcaatacaacctattaatttcccctcatcaaaaataaggttatcaagtgagaaatcaccatgagtgaccactgaatctggtgagaatggcaaaagattatgcatttctttccagacttgttcaacaggccagccatttctctcatcatcaaaatcactggcatcaaccaaaccattattcattcttgattgggcctgagccagtctaaatactctatcagagttaaaaggacaattacaaacaggaatggaatgcaatcttctcaggaacactgccagggcatcaacaatattttcacctgaatcaggatattcttccaatacctggaatgctgttttccctgggatggcagtggtgagtaaccatgcatcatcaggagttctgataaaatgcttgatggttggaagaggcataaattcagtcagccagtttagtctgaccatctcatctgtaacatcattggcaacagaacctttgccatgtttcagaaacaactctggggcatctggcttcccatacaatctatagattgtggcacctgattgcccaacattatctctagcccatttatacccatataaatcagcatccatgttggaatttaatcttggcctggagcaagaggtttctctttgaatatggctcatacatgtgcacctcctatagtgagttgtattatactatgcagatatactatgccaatgtttaattgtcag

SEQ ID NO: 27 - DNA, 9762 bp, synthetic construct
  source 1..9762: mol_type = other DNA; note = Synthetic
cactatgtgttaattaaaattatctctaaggcatgtgaactggctgtcttggttttcatctgtacttcatctgctacctctgtgacctgaaacatatttataattccattaagctgtgcatatgatagatttatcatatgtattttccttaaaggatttttgtaagaactaattgaattgatacctgtaaagtctttatcacactacccaataaataataaatctctttgttcagctctctgtttctataaatatgtaccagttttattgtttttagtggtagtgattttattctctttctatatatatacacacacatgtgtgcattcataaatatatacaatttttatgaataaaaaattattagcaatcaatattgaaaaccactgatttttgtttatgtgagcaaacagcagattaaaaggaatttgaattctcatagctagcaggagtcaatgggaaaaacccattggagccaagtacactgactcaatagggactttccattgggttttgcccagtacataaggtcaatagggggtgagtcaacaggaaagtcccattggagccaagtacattgagtcaatagggactttccaatgggttttgcccagtacataaggtcaatgggaggtaagccaatgggtttttcccattactgacatgtatactgagtcattagggactttccaatgggttttgcccagtacataaggtcaataggggtgaatcaacaggaaagtcccattggagccaagtacactgagtcaatagggactttccattgggttttgcccagtacaaaaggtcaatagggggtgagtcaatgggtttttcccattattggcacatacataaggtcaataggggtgactagtggagaagagcatgcttgagggctgagtgcccctcagtgggcagagagcacatggcccacagtccctgagaagttggggggaggggtgggcaattgaactggtgcctagagaaggtggggcttgggtaaactgggaaagtgatgtggtgtactggctccacctttttccccagggtgggggagaaccatatataagtgcagtagtctctgtgaacattcaagcttctgccttctccctcctgtgagtttggtaagtcactgactgtctatgcctgggaaagggtgggcaggagatggggcagtgcaggaaaagtggcactatgaaccctgcagccctagacaattgtactaaccttcttctctttcctctcctgacaggttggtaaccaagccaccatgggatggtccctgatcctgctgtttctggtggctgtggccaccagagtgctgtctcaggttcagctggtgcagtctggggctgaagtgaagaaacctggggcctctgtgaaggtgtcctgcaaggcttctggctacacattcacaggctactacatgcactgggtcagacaggcccctggacagggacttgagtggatgggcagaatcaaccccaacagtggtggcaccaactatgcccagaaattccagggcagagtgaccatgaccagagacaccagcatcagcacagcctacatggaactgagcaggcttaggagtgatgacactgctgtgtactactgtgccagagtgccctactgcagcagcacctcttgtcacagagactggtactttgacctgtggggcagaggcaccctggtcacagttagctctgccagcacaaagggcccctctgtgtttcctctggctcccagcagcaagagcaccagtggtggaacagctgccctgggctgtctggtcaaggactactttcctgagcctgtgacagtgtcctggaactctggggctctgacatctggggtgcacacattccctgctgtgctgcagtcctctggcctgtacagcctgtcctctgtggtcactgtgcctagctctagcctgggcacccagacctacatctgcaatgtgaaccacaagcctagcaacaccaaggtggacaagaaggctgagcccaagagctgtgataagacccacacctgtcctccatgtcctgctccagagctgcttggaggaccatcagtgtttctgttccctccaaagcctaaggacaccctgatgatcagcagaacccctgaagtgacctgtgtggtggtggatgtgtcccatgaggacccagaagtgaagttcaattggtatgtggatggtgttgaggtgcacaatgccaagaccaagcctagagaggaacagtacaacagcacctacagagtggtgtctgtgctgacagtgctgcaccaggactggctgaatggcaaagagtacaagtgcaaggtgtccaacaaggccctgcctgctcctattgaaaagaccatcagcaaggccaagggccagcctagggaaccccaagtgtataccctgcctcctagcagagatgagctgaccaagaaccaggtgtccctgacatgcctggttaagggcttctacccctctgacattgctgtggaatgggagagcaatggccagcctgagaacaactacaagaccacacctcctgtgctggactctgatggctcattcttcctgtactccaagctgactgtggacaagtccagatggcagcaaggcaatgtgttcagctgctctgtgatgcatgaggccctgcacaaccactacacacagaagtctctgtctctgagccctggcaagagaaagagaaggagtggctctggggccaccaacttcagcctgctgaaacaggctggggatgttgaagagaaccctggacctatggacttccaggtgcagatcatcagctttctgcttatctctgccagtgtgatcatgagcaggggagacatccagatgacacagagccctctgagcctgccagtgacacctggggaacctgccagcatctcttgcagaagctctcagagcctcctggattctgatgatggcaacacctacctggactggtatctgcagaagcctggccagtctcctcagctgctgatctacaccctgagctacagagccagtggggtgccagacagattctctggctctggatctggcactgacttcacactgaagattagcagagtggaagctgaggatgtgggagtctactactgtatgcagaggattgagttccctctgacttttggtggtggtacaaaggtggaaatcaagaggacagtggctgctccttctgtgttcatcttcccaccatctgatgagcagctcaagagtggcacagcctctgttgtgtgtctgctgaacaacttctaccctagggaagccaaggtgcagtggaaagtggacaatgccctccagtctggcaacagccaagagagtgtgacagaacaggacagcaaggactccacctacagcctgagcagcaccctgacactgagcaaggctgactatgagaagcacaaagtctatgcctgtgaagtgacacaccagggactgagcagccctgtgaccaagagcttcaacaggggagagtgcagctgaagatctacttctggctaataaaagatcagagctctagtgatctgtgtgttggttttttgtgtctgcattctagcagagccccactgtgttcatcttacagatggaaatactgacattcagaggagttagttaacttgcctaggtgattcagctaataagtgcaagaaagatttcaatccaaggtgatttgattctgaagcctgtgctaatcacattacaccaagctacaacttcatttataaataataagtcagctttcaagggcctttcaggtgtcctgcacttctacaagctgtgccatttagtgaacacaaaatgagccttctgatgaagtagtcttttcattatttcagatattagaacactaaaattcttagctgccagctgattgaaggctgggacaaaattcaaacatgcatctacaacaatatatatctcaatgttagtctccaaattctattgacttcaactcaagagaatataaagagctagtctttatacactctttaaggtatgatatcatctggaaagtaacaaaattgatgcaaatttgaatgaactttatcatggtgtatttacacaatgtgtttcttctccctgcaatgtatttctttctctaattccttccatttgatctttcatacacaatctggttctgatgtatgttttttggatgcacttttcaactccaaaagacagagctagttactttcttcctggtgctccaagcactgtatttgtatctgtattcaagccctttgcaatattgtactggatcattatttcacctctaggatggcttccccaggcaacttgtgttcacccagagactacattttgtatcttgttgacctttgaacttccaccagtgtctaaaaataatatgtatgcaaaattacttgctatgagaatgtataattaaacaatataaaaaggagaagcaaggagagaaacacaggtgtgtatttgtgtttgtgtgcttaaaaggcagtgtggaaaaggaagaaatgccatttatagtgaggagacaaagttatattacctcttatctggcttttaaggagattttgctgagctaaaaatcctatattcatagaaaagccttacctgagttgccaatacctcaattcagtctagcaggagtcaatgggaaaaacccattggagccaagtacactgactcaatagggactttccattgggttttgcccagtacataaggtcaatagggggtgagtcaacaggaaagtcccattggagccaagtacattgagtcaatagggactttccaatgggttttgcccagtacataaggtcaatgggaggtaagccaatgggtttttcccattactgacatgtatactgagtcattagggactttccaatgggttttgcccagtacataaggtcaataggggtgaatcaacaggaaagtcccattggagccaagtacactgagtcaatagggactttccattgggttttgcccagtacaaaaggtcaatagggggtgagtcaatgggtttttcccattattggcacatacataaggtcaataggggtgactagtggagaagagcatgcttgagggctgagtgcccctcagtgggcagagagcacatggcccacagtccctgagaagttggggggaggggtgggcaattgaactggtgcctagagaaggtggggcttgggtaaactgggaaagtgatgtggtgtactggctccacctttttccccagggtgggggagaaccatatataagtgcagtagtctctgtgaacattcaagcttctgccttctccctcctgtgagtttggtaagtcactgactgtctatgcctgggaaagggtgggcaggagatggggcagtgcaggaaaagtggcactatgaaccctgcagccctagacaattgtactaaccttcttctctttcctctcctgacaggttggtaaccaagccaccatgagcagcagctcttggctgctgctgagtctggtggctgtgacagctgcccagagcaccattgaggaacaggccaagaccttcctggacaagttcaaccatgaggctgaggacctgttctaccagagcagcctggccagctggaactacaacaccaacatcactgaagagaatgtgcagaacatgaacaatgctggggacaagtggagtgccttcctgaaagagcagagcacactggcccagatgtaccctctgcaagagatccagaacctgacagtgaagctccagctccaggctctccagcagaatggcagctctgtgctgtctgaggacaagagcaagagactgaacaccatcctgaacacaatgagcaccatctacagcacaggcaaagtgtgcaaccctgacaaccctcaagagtgcctgctgctggaacctggcctgaatgagatcatggccaacagcctggactacaatgagagactgtgggcctgggagtcttggaggagtgaagtgggaaagcagctgaggcccctgtatgaggaatatgtggtgctgaagaatgagatggccagggccaaccactatgaggactatggggattattggaggggagactatgaagtgaatggtgttgatggctatgactacagcaggggccagctgattgaggatgtggaacacacctttgaggaaatcaagcccctctatgagcacctccatgcctatgtcagagccaagctgatgaatgcttaccccagctacatcagccccattggctgcctgcctgctcatctgctgggagacatgtggggcagattctggaccaacctgtacagcctgactgtgccctttggccagaaacctaacattgatgtgacagatgccatggtggatcaggcctgggatgcccagagaatcttcaaagaggctgagaagttctttgtgtctgtggggctgcccaacatgacccaaggcttttgggagaactccatgctgacagaccctggcaatgtgcaaaaggctgtgtgtcaccccacagcctgggaccttggcaagggagacttcagaatcctgatgtgcaccaaagtgacaatggatgactttctgacagctcaccatgagatgggccacatccagtatgacatggcctatgctgcccagcctttcctgctgagaaatggggccaatgagggcttccatgaggcagtgggagagatcatgagcctgtctgctgccacacctaagcacctgaagtccattggcctgctgagccctgacttccaagaggacaatgagacagagatcaacttcctgctcaagcaggccctgaccattgtgggcacactgcccttcacctacatgctggaaaagtggagatggatggtctttaagggagaaatccccaaggaccagtggatgaagaaatggtgggagatgaagagggaaattgtgggagttgtggaacctgtgccacatgatgagacatactgtgaccctgccagcctgttccatgtgtccaatgactactccttcattaggtactacaccaggacactgtaccagttccagtttcaagaggctctgtgtcaggctgctaaacatgagggcccactgcacaagtgtgacatcagcaactccacagaggctggacagaaactgttcaacatgctgagactgggcaagtctgagccttggactctggccctggaaaatgttgtgggagccaagaatatgaatgtcagacccctgctgaactactttgagcccctgttcacctggctgaaggaccagaacaagaacagctttgttggctggtccacagactggtccccatatgctgaccagagcatcaaagtcagaatcagcctgaagagtgccctgggagataaggcctatgagtggaatgataatgagatgtacctgttcaggtcctctgtggcttatgctatgagacagtactttctgaaagtgaagaaccagatgatcctgtttggagaagaggatgtcagagtggccaacctgaagcctagaatcagcttcaacttctttgtgacagcccctaagaatgtgtctgacatcatccccagaacagaggtggaaaaggccatcagaatgagcaggtccaggatcaatgatgccttcaggctcaatgacaactccctggaatttctgggcattcagcccacactgggccctccaaatcagcctcctgtgtcctaaagatctacttctggctaataaaagatcagagctctagtgatctgtgtgttggttttttgtgtctgcattctagcaagtcaatatgttcaccccaaaaaagctgtttgttaacttgtcaacctcattctaaaatgtatatagaagcccaaaagacaataacaaaaatattcttgtagaacaaaatgggaaagaatgttccactaaatatcaagatttagagcaaagcatgagatgtgtggggatagacagtgaggctgataaaatagagtagagctcagaaacagacccattgatatatgtaagtgacctatgaaaaaaatatggcattttacaatgggaaaatgatggtctttttcttttttagaaaaacagggaaatatatttatatgtaaaaaataaaagggaacccatatgtcataccatacacacaaaaaaattccagtgaattataagtctaaatggagaaggcaaaactttaaatcttttagaaaataatatagaagcatgccatcaagacttcagtgtagagaaaaatttcttatgactcaaagtcctaaccacaaagaaaagattgttaattagattgcatgaatattaagacttatttttaaaattaaaaaaccattaagaaaagtcaggccatagaatgacagaaaatatttgcaacaccccagtaaagagaattgtaatatgcagattataaaaagaagtcttacaaatcagtaaaaaataaaactagacaaaaatttgaacagatgaaagagaaactctaaataatcattacacatgagaaactcaatctcagaaatcagagaactatcattgcatatacactaaattagagaaatattaaaaggctaagtaacatctgtggcttaattaatctagctctagtgatcagcagttcaacctgttgatagtatgtactaagctctcatgtttaatgtactaagctctcatgtttaatgaactaaaccctcatggctaatgtactaagctctcatggctaatgtactaagctctcatgtttcatgtactaagctctcatgtttgaacaataaaattaatataaatcagcaacttaaatagcctctaaggttttaagttttataagaaaaaaaagaatatataaggcttttaaaggttttaaggtttcctaggttatcctcatatgagctcttagaaaaactcatccagcatcaaatgaaactgcaatttattcatatcaggattatcaataccatatttttgaaaaagtcttttctgtaatgaaggagaaaactcacccaggcagttccataggatggcaagatcctggtatctgtctgcaattccaactcttccaacatcaatacaacctattaatttcccctcatcaaaaataaggttatcaagtgagaaatcaccatgagtgaccactgaatctggtgagaatggcaaaagattatgcatttctttccagacttgttcaacaggccagccatttctctcatcatcaaaatcactggcatcaaccaaaccattattcattcttgattgggcctgagccagtctaaatactctatcagagttaaaaggacaattacaaacaggaatggaatgcaatcttctcaggaacactgccagggcatcaacaatattttcacctgaatcaggatattcttccaatacctggaatgctgttttccctgggatggcagtggtgagtaaccatgcatcatcaggagttctgataaaatgcttgatggttggaagaggcataaattcagtcagccagtttagtctgaccatctcatctgtaacatcattggcaacagaacctttgccatgtttcagaaacaactctggggcatctggcttcccatacaatctatagattgtggcacctgattgcccaacattatctctagcccatttatacccatataaatcagcatccatgttggaatttaatcttggcctggagcaagaggtttctctttgaatatggctcatacatgtgcacctcctatagtgagttgtattatactatgcagatatactatgccaatgtttaattgtcag

SEQ ID NO: 28 - DNA, 9762 bp, synthetic construct
  source 1..9762: mol_type = other DNA; note = Synthetic
cactatgtgttaattaaaattatctctaaggcatgtgaactggctgtcttggttttcatctgtacttcatctgctacctctgtgacctgaaacatatttataattccattaagctgtgcatatgatagatttatcatatgtattttccttaaaggatttttgtaagaactaattgaattgatacctgtaaagtctttatcacactacccaataaataataaatctctttgttcagctctctgtttctataaatatgtaccagttttattgtttttagtggtagtgattttattctctttctatatatatacacacacatgtgtgcattcataaatatatacaatttttatgaataaaaaattattagcaatcaatattgaaaaccactgatttttgtttatgtgagcaaacagcagattaaaaggaatttgaattctcatagctagcaggagtcaatgggaaaaacccattggagccaagtacactgactcaatagggactttccattgggttttgcccagtacataaggtcaatagggggtgagtcaacaggaaagtcccattggagccaagtacattgagtcaatagggactttccaatgggttttgcccagtacataaggtcaatgggaggtaagccaatgggtttttcccattactgacatgtatactgagtcattagggactttccaatgggttttgcccagtacataaggtcaataggggtgaatcaacaggaaagtcccattggagccaagtacactgagtcaatagggactttccattgggttttgcccagtacaaaaggtcaatagggggtgagtcaatgggtttttcccattattggcacatacataaggtcaataggggtgactagtggagaagagcatgcttgagggctgagtgcccctcagtgggcagagagcacatggcccacagtccctgagaagttggggggaggggtgggcaattgaactggtgcctagagaaggtggggcttgggtaaactgggaaagtgatgtggtgtactggctccacctttttccccagggtgggggagaaccatatataagtgcagtagtctctgtgaacattcaagcttctgccttctccctcctgtgagtttggtaagtcactgactgtctatgcctgggaaagggtgggcaggagatggggcagtgcaggaaaagtggcactatgaaccctgcagccctagacaattgtactaaccttcttctctttcctctcctgacaggttggtaaccaagccaccatgagcagcagctcttggctgctgctgagtctggtggctgtgacagctgcccagagcaccattgaggaacaggccaagaccttcctggacaagttcaaccatgaggctgaggacctgttctaccagagcagcctggccagctggaactacaacaccaacatcactgaagagaatgtgcagaacatgaacaatgctggggacaagtggagtgccttcctgaaagagcagagcacactggcccagatgtaccctctgcaagagatccagaacctgacagtgaagctccagctccaggctctccagcagaatggcagctctgtgctgtctgaggacaagagcaagagactgaacaccatcctgaacacaatgagcaccatctacagcacaggcaaagtgtgcaaccctgacaaccctcaagagtgcctgctgctggaacctggcctgaatgagatcatggccaacagcctggactacaatgagagactgtgggcctgggagtcttggaggagtgaagtgggaaagcagctgaggcccctgtatgaggaatatgtggtgctgaagaatgagatggccagggccaaccactatgaggactatggggattattggaggggagactatgaagtgaatggtgttgatggctatgactacagcaggggccagctgattgaggatgtggaacacacctttgaggaaatcaagcccctctatgagcacctccatgcctatgtcagagccaagctgatgaatgcttaccccagctacatcagccccattggctgcctgcctgctcatctgctgggagacatgtggggcagattctggaccaacctgtacagcctgactgtgccctttggccagaaacctaacattgatgtgacagatgccatggtggatcaggcctgggatgcccagagaatcttcaaagaggctgagaagttctttgtgtctgtggggctgcccaacatgacccaaggcttttgggagaactccatgctgacagaccctggcaatgtgcaaaaggctgtgtgtcaccccacagcctgggaccttggcaagggagacttcagaatcctgatgtgcaccaaagtgacaatggatgactttctgacagctcaccatgagatgggccacatccagtatgacatggcctatgctgcccagcctttcctgctgagaaatggggccaatgagggcttccatgaggcagtgggagagatcatgagcctgtctgctgccacacctaagcacctgaagtccattggcctgctgagccctgacttccaagaggacaatgagacagagatcaacttcctgctcaagcaggccctgaccattgtgggcacactgcccttcacctacatgctggaaaagtggagatggatggtctttaagggagaaatccccaaggaccagtggatgaagaaatggtgggagatgaagagggaaattgtgggagttgtggaacctgtgccacatgatgagacatactgtgaccctgccagcctgttccatgtgtccaatgactactccttcattaggtactacaccaggacactgtaccagttccagtttcaagaggctctgtgtcaggctgctaaacatgagggcccactgcacaagtgtgacatcagcaactccacagaggctggacagaaactgttcaacatgctgagactgggcaagtctgagccttggactctggccctggaaaatgttgtgggagccaagaatatgaatgtcagacccctgctgaactactttgagcccctgttcacctggctgaaggaccagaacaagaacagctttgttggctggtccacagactggtccccatatgctgaccagagcatcaaagtcagaatcagcctgaagagtgccctgggagataaggcctatgagtggaatgataatgagatgtacctgttcaggtcctctgtggcttatgctatgagacagtactttctgaaagtgaagaaccagatgatcctgtttggagaagaggatgtcagagtggccaacctgaagcctagaatcagcttcaacttctttgtgacagcccctaagaatgtgtctgacatcatccccagaacagaggtggaaaaggccatcagaatgagcaggtccaggatcaatgatgccttcaggctcaatgacaactccctggaatttctgggcattcagcccacactgggccctccaaatcagcctcctgtgtcctaaagatctacttctggctaataaaagatcagagctctagtgatctgtgtgttggttttttgtgtctgcattctagcagagccccactgtgttcatcttacagatggaaatactgacattcagaggagttagttaacttgcctaggtgattcagctaataagtgcaagaaagatttcaatccaaggtgatttgattctgaagcctgtgctaatcacattacaccaagctacaacttcatttataaataataagtcagctttcaagggcctttcaggtgtcctgcacttctacaagctgtgccatttagtgaacacaaaatgagccttctgatgaagtagtcttttcattatttcagatattagaacactaaaattcttagctgccagctgattgaaggctgggacaaaattcaaacatgcatctacaacaatatatatctcaatgttagtctccaaattctattgacttcaactcaagagaatataaagagctagtctttatacactctttaaggtatgatatcatctggaaagtaacaaaattgatgcaaatttgaatgaactttatcatggtgtatttacacaatgtgtttcttctccctgcaatgtatttctttctctaattccttccatttgatctttcatacacaatctggttctgatgtatgttttttggatgcacttttcaactccaaaagacagagctagttactttcttcctggtgctccaagcactgtatttgtatctgtattcaagccctttgcaatattgtactggatcattatttcacctctaggatggcttccccaggcaacttgtgttcacccagagactacattttgtatcttgttgacctttgaacttccaccagtgtctaaaaataatatgtatgcaaaattacttgctatgagaatgtataattaaacaatataaaaaggagaagcaaggagagaaacacaggtgtgtatttgtgtttgtgtgcttaaaaggcagtgtggaaaaggaagaaatgccatttatagtgaggagacaaagttatattacctcttatctggcttttaaggagattttgctgagctaaaaatcctatattcatagaaaagccttacctgagttgccaatacctcaattcagtctagcaggagtcaatgggaaaaacccattggagccaagtacactgactcaatagggactttccattgggttttgcccagtacataaggtcaatagggggtgagtcaacaggaaagtcccattggagccaagtacattgagtcaatagggactttccaatgggttttgcccagtacataaggtcaatgggaggtaagccaatgggtttttcccattactgacatgtatactgagtcattagggactttccaatgggttttgcccagtacataaggtcaataggggtgaatcaacaggaaagtcccattggagccaagtacactgagtcaatagggactttccattgggttttgcccagtacaaaaggtcaatagggggtgagtcaatgggtttttcccattattggcacatacataaggtcaataggggtgactagtggagaagagcatgcttgagggctgagtgcccctcagtgggcagagagcacatggcccacagtccctgagaagttggggggaggggtgggcaattgaactggtgcctagagaaggtggggcttgggtaaactgggaaagtgatgtggtgtactggctccacctttttccccagggtgggggagaaccatatataagtgcagtagtctctgtgaacattcaagcttctgccttctccctcctgtgagtttggtaagtcactgactgtctatgcctgggaaagggtgggcaggagatggggcagtgcaggaaaagtggcactatgaaccctgcagccctagacaattgtactaaccttcttctctttcctctcctgacaggttggtaaccaagccaccatgggatggtccctgatcctgctgtttctggtggctgtggccaccagagtgctgtctcaggttcagctggtgcagtctggggctgaagtgaagaaacctggggcctctgtgaaggtgtcctgcaaggcttctggctacacattcacaggctactacatgcactgggtcagacaggcccctggacagggacttgagtggatgggcagaatcaaccccaacagtggtggcaccaactatgcccagaaattccagggcagagtgaccatgaccagagacaccagcatcagcacagcctacatggaactgagcaggcttaggagtgatgacactgctgtgtactactgtgccagagtgccctactgcagcagcacctcttgtcacagagactggtactttgacctgtggggcagaggcaccctggtcacagttagctctgccagcacaaagggcccctctgtgtttcctctggctcccagcagcaagagcaccagtggtggaacagctgccctgggctgtctggtcaaggactactttcctgagcctgtgacagtgtcctggaactctggggctctgacatctggggtgcacacattccctgctgtgctgcagtcctctggcctgtacagcctgtcctctgtggtcactgtgcctagctctagcctgggcacccagacctacatctgcaatgtgaaccacaagcctagcaacaccaaggtggacaagaaggctgagcccaagagctgtgataagacccacacctgtcctccatgtcctgctccagagctgcttggaggaccatcagtgtttctgttccctccaaagcctaaggacaccctgatgatcagcagaacccctgaagtgacctgtgtggtggtggatgtgtcccatgaggacccagaagtgaagttcaattggtatgtggatggtgttgaggtgcacaatgccaagaccaagcctagagaggaacagtacaacagcacctacagagtggtgtctgtgctgacagtgctgcaccaggactggctgaatggcaaagagtacaagtgcaaggtgtccaacaaggccctgcctgctcctattgaaaagaccatcagcaaggccaagggccagcctagggaaccccaagtgtataccctgcctcctagcagagatgagctgaccaagaaccaggtgtccctgacatgcctggttaagggcttctacccctctgacattgctgtggaatgggagagcaatggccagcctgagaacaactacaagaccacacctcctgtgctggactctgatggctcattcttcctgtactccaagctgactgtggacaagtccagatggcagcaaggcaatgtgttcagctgctctgtgatgcatgaggccctgcacaaccactacacacagaagtctctgtctctgagccctggcaagagaaagagaaggagtggctctggggccaccaacttcagcctgctgaaacaggctggggatgttgaagagaaccctggacctatggacttccaggtgcagatcatcagctttctgcttatctctgccagtgtgatcatgagcaggggagacatccagatgacacagagccctctgagcctgccagtgacacctggggaacctgccagcatctcttgcagaagctctcagagcctcctggattctgatgatggcaacacctacctggactggtatctgcagaagcctggccagtctcctcagctgctgatctacaccctgagctacagagccagtggggtgccagacagattctctggctctggatctggcactgacttcacactgaagattagcagagtggaagctgaggatgtgggagtctactactgtatgcagaggattgagttccctctgacttttggtggtggtacaaaggtggaaatcaagaggacagtggctgctccttctgtgttcatcttcccaccatctgatgagcagctcaagagtggcacagcctctgttgtgtgtctgctgaacaacttctaccctagggaagccaaggtgcagtggaaagtggacaatgccctccagtctggcaacagccaagagagtgtgacagaacaggacagcaaggactccacctacagcctgagcagcaccctgacactgagcaaggctgactatgagaagcacaaagtctatgcctgtgaagtgacacaccagggactgagcagccctgtgaccaagagcttcaacaggggagagtgcagctgaagatctacttctggctaataaaagatcagagctctagtgatctgtgtgttggttttttgtgtctgcattctagcaagtcaatatgttcaccccaaaaaagctgtttgttaacttgtcaacctcattctaaaatgtatatagaagcccaaaagacaataacaaaaatattcttgtagaacaaaatgggaaagaatgttccactaaatatcaagatttagagcaaagcatgagatgtgtggggatagacagtgaggctgataaaatagagtagagctcagaaacagacccattgatatatgtaagtgacctatgaaaaaaatatggcattttacaatgggaaaatgatggtctttttcttttttagaaaaacagggaaatatatttatatgtaaaaaataaaagggaacccatatgtcataccatacacacaaaaaaattccagtgaattataagtctaaatggagaaggcaaaactttaaatcttttagaaaataatatagaagcatgccatcaagacttcagtgtagagaaaaatttcttatgactcaaagtcctaaccacaaagaaaagattgttaattagattgcatgaatattaagacttatttttaaaattaaaaaaccattaagaaaagtcaggccatagaatgacagaaaatatttgcaacaccccagtaaagagaattgtaatatgcagattataaaaagaagtcttacaaatcagtaaaaaataaaactagacaaaaatttgaacagatgaaagagaaactctaaataatcattacacatgagaaactcaatctcagaaatcagagaactatcattgcatatacactaaattagagaaatattaaaaggctaagtaacatctgtggcttaattaatctagctctagtgatcagcagttcaacctgttgatagtatgtactaagctctcatgtttaatgtactaagctctcatgtttaatgaactaaaccctcatggctaatgtactaagctctcatggctaatgtactaagctctcatgtttcatgtactaagctctcatgtttgaacaataaaattaatataaatcagcaacttaaatagcctctaaggttttaagttttataagaaaaaaaagaatatataaggcttttaaaggttttaaggtttcctaggttatcctcatatgagctcttagaaaaactcatccagcatcaaatgaaactgcaatttattcatatcaggattatcaataccatatttttgaaaaagtcttttctgtaatgaaggagaaaactcacccaggcagttccataggatggcaagatcctggtatctgtctgcaattccaactcttccaacatcaatacaacctattaatttcccctcatcaaaaataaggttatcaagtgagaaatcaccatgagtgaccactgaatctggtgagaatggcaaaagattatgcatttctttccagacttgttcaacaggccagccatttctctcatcatcaaaatcactggcatcaaccaaaccattattcattcttgattgggcctgagccagtctaaatactctatcagagttaaaaggacaattacaaacaggaatggaatgcaatcttctcaggaacactgccagggcatcaacaatattttcacctgaatcaggatattcttccaatacctggaatgctgttttccctgggatggcagtggtgagtaaccatgcatcatcaggagttctgataaaatgcttgatggttggaagaggcataaattcagtcagccagtttagtctgaccatctcatctgtaacatcattggcaacagaacctttgccatgtttcagaaacaactctggggcatctggcttcccatacaatctatagattgtggcacctgattgcccaacattatctctagcccatttatacccatataaatcagcatccatgttggaatttaatcttggcctggagcaagaggtttctctttgaatatggctcatacatgtgcacctcctatagtgagttgtattatactatgcagatatactatgccaatgtttaattgtcag

SEQ ID NO: 29 - DNA, 13521 bp, synthetic construct
  source 1..13521: mol_type = other DNA; note = Synthetic
cactatgtgaattggaattctcatagctagcaggagtcaatgggaaaaacccattggagccaagtacactgactcaatagggactttccattgggttttgcccagtacataaggtcaatagggggtgagtcaacaggaaagtcccattggagccaagtacattgagtcaatagggactttccaatgggttttgcccagtacataaggtcaatgggaggtaagccaatgggtttttcccattactgacatgtatactgagtcattagggactttccaatgggttttgcccagtacataaggtcaataggggtgaatcaacaggaaagtcccattggagccaagtacactgagtcaatagggactttccattgggttttgcccagtacaaaaggtcaatagggggtgagtcaatgggtttttcccattattggcacatacataaggtcaataggggtgactagtggagaagagcatgcttgagggctgagtgcccctcagtgggcagagagcacatggcccacagtccctgagaagttggggggaggggtgggcaattgaactggtgcctagagaaggtggggcttgggtaaactgggaaagtgatgtggtgtactggctccacctttttccccagggtgggggagaaccatatataagtgcagtagtctctgtgaacattcaagcttctgccttctccctcctgtgagtttggtaagtcactgactgtctatgcctgggaaagggtgggcaggagatggggcagtgcaggaaaagtggcactatgaaccctgcagccctagacaattgtactaaccttcttctctttcctctcctgacaggttggtaaccatgggatggtccctgatcctgctgtttctggtggctgtggccaccagagtgctgtctcaggttcagctggtgcagtctggggctgaagtgaagaaacctggggcctctgtgaaggtgtcctgcaaggcttctggctacacattcacaggctactacatgcactgggtcagacaggcccctggacagggacttgagtggatgggcagaatcaaccccaacagtggtggcaccaactatgcccagaaattccagggcagagtgaccatgaccagagacaccagcatcagcacagcctacatggaactgagcaggcttaggagtgatgacactgctgtgtactactgtgccagagtgccctactgcagcagcacctcttgtcacagagactggtactttgacctgtggggcagaggcaccctggtcacagttagctctgccagcacaaagggcccctctgtgtttcctctggctcccagcagcaagagcaccagtggtggaacagctgccctgggctgtctggtcaaggactactttcctgagcctgtgacagtgtcctggaactctggggctctgacatctggggtgcacacattccctgctgtgctgcagtcctctggcctgtacagcctgtcctctgtggtcactgtgcctagctctagcctgggcacccagacctacatctgcaatgtgaaccacaagcctagcaacaccaaggtggacaagaaggctgagcccaagagctgtgataagacccacacctgtcctccatgtcctgctccagagctgcttggaggaccatcagtgtttctgttccctccaaagcctaaggacaccctgatgatcagcagaacccctgaagtgacctgtgtggtggtggatgtgtcccatgaggacccagaagtgaagttcaattggtatgtggatggtgttgaggtgcacaatgccaagaccaagcctagagaggaacagtacaacagcacctacagagtggtgtctgtgctgacagtgctgcaccaggactggctgaatggcaaagagtacaagtgcaaggtgtccaacaaggccctgcctgctcctattgaaaagaccatcagcaaggccaagggccagcctagggaaccccaagtgtataccctgcctcctagcagagatgagctgaccaagaaccaggtgtccctgacatgcctggttaagggcttctacccctctgacattgctgtggaatgggagagcaatggccagcctgagaacaactacaagaccacacctcctgtgctggactctgatggctcattcttcctgtactccaagctgactgtggacaagtccagatggcagcaaggcaatgtgttcagctgctctgtgatgcatgaggccctgcacaaccactacacacagaagtctctgtctctgagccctggcaagagaaagagaaggagtggctctggggccaccaacttcagcctgctgaaacaggctggggatgttgaagagaaccctggacctatggacttccaggtgcagatcatcagctttctgcttatctctgccagtgtgatcatgagcaggggagacatccagatgacacagagccctctgagcctgccagtgacacctggggaacctgccagcatctcttgcagaagctctcagagcctcctggattctgatgatggcaacacctacctggactggtatctgcagaagcctggccagtctcctcagctgctgatctacaccctgagctacagagccagtggggtgccagacagattctctggctctggatctggcactgacttcacactgaagattagcagagtggaagctgaggatgtgggagtctactactgtatgcagaggattgagttccctctgacttttggtggtggtacaaaggtggaaatcaagaggacagtggctgctccttctgtgttcatcttcccaccatctgatgagcagctcaagagtggcacagcctctgttgtgtgtctgctgaacaacttctaccctagggaagccaaggtgcagtggaaagtggacaatgccctccagtctggcaacagccaagagagtgtgacagaacaggacagcaaggactccacctacagcctgagcagcaccctgacactgagcaaggctgactatgagaagcacaaagtctatgcctgtgaagtgacacaccagggactgagcagccctgtgaccaagagcttcaacaggggagagtgcagctgaagatctacttctggctaataaaagatcagagctctagtgatctgtgtgttggttttttgtgtctgcattctagcaggagtcaatgggaaaaacccattggagccaagtacactgactcaatagggactttccattgggttttgcccagtacataaggtcaatagggggtgagtcaacaggaaagtcccattggagccaagtacattgagtcaatagggactttccaatgggttttgcccagtacataaggtcaatgggaggtaagccaatgggtttttcccattactgacatgtatactgagtcattagggactttccaatgggttttgcccagtacataaggtcaataggggtgaatcaacaggaaagtcccattggagccaagtacactgagtcaatagggactttccattgggttttgcccagtacaaaaggtcaatagggggtgagtcaatgggtttttcccattattggcacatacataaggtcaataggggtgactagtggagaagagcatgcttgagggctgagtgcccctcagtgggcagagagcacatggcccacagtccctgagaagttggggggaggggtgggcaattgaactggtgcctagagaaggtggggcttgggtaaactgggaaagtgatgtggtgtactggctccacctttttccccagggtgggggagaaccatatataagtgcagtagtctctgtgaacattcaagcttctgccttctccctcctgtgagtttggtaagtcactgactgtctatgcctgggaaagggtgggcaggagatggggcagtgcaggaaaagtggcactatgaaccctgcagccctagacaattgtactaaccttcttctctttcctctcctgacaggttggtaaccatgggctggtccctgatcctgctgttcctggtggctgtggccaccagagtgctgagccaggtgcagctgcagcagcctggggctgagcttgtgaaacctggggcctctgtgaagatgagctgcaaggcctctggctacaccttcaccagctacaacatgcactgggtcaagcagacccctggcagaggcctggaatggattggagccatctaccctggcaatggggacacctcctacaaccagaagttcaagggcaaggccaccctgacagctgacaagagcagcagcacagcctacatgcagctgtccagcctgacctctgaggactctgctgtgtactactgtgccaggtccacctactatgggggagactggtacttcaatgtgtggggagctggcaccacagtgacagtgtctgctgccagcaccaagggcccctctgtgtttcctctggcccccagcagcaagagcacctctgggggaacagctgccctgggctgccttgtgaaggactacttccctgagcctgtgactgtgtcctggaactctggggccctgacatctggggtgcacaccttccctgcagtgctgcagtccagtggcctgtactccctgtcctctgttgtgacagtgcccagctccagcctgggcacccagacctacatctgcaatgtgaaccacaagcccagcaacaccaaggtggacaagaaggctgagcccaagagctgtgacaagacccacacctgtcccccctgtcctgcccctgaactgctgggaggaccttctgtgttcctgttcccacccaagcccaaggataccctgatgatcagcagaacccctgaagtgacctgtgtggtggtggatgtgtcccatgaggacccagaagtgaagttcaattggtatgtggatggggtggaagtgcacaatgccaagaccaagcccagagaggaacagtacaacagcacctacagagtggtgtctgtgctgactgtgctgcaccaggactggctgaatggcaaagagtacaagtgcaaggtgtccaacaaggccctgccagcccccattgagaaaaccatcagcaaggccaagggccagcctagagaaccccaggtgtacacactgccccctagcagggatgagctgaccaagaaccaggtgtccctgacatgccttgtgaaaggcttctacccctctgacattgctgtggaatgggagagcaatggacagcctgagaacaactacaagaccaccccccctgtgctggactctgatggctcattcttcctgtacagcaagctgacagtggacaagtccagatggcagcagggcaatgtgttcagctgctctgtgatgcatgaggccctgcacaaccactacacccagaaaagcctgtccctgtcccctggcaagagaaagagaaggagtggaagtggagctactaacttcagcctgctgaagcaggctggagatgtggaggagaaccctggacctatggacttccaggtgcagatcatcagctttctgctgatctctgcctctgtgatcatgagcagaggccagattgtgctgagccagagccctgccatcctgtctgcaagccctggggagaaagtgaccatgacctgcagagccagcagctctgtgtcctacatccactggttccagcagaagcctggcagcagccccaagccttggatctatgccaccagcaacctggcatctggggtgccagtcagattctctggctctggatctggcaccagctacagcctgaccatcagcagagtggaagctgaggatgctgccacctactactgccagcagtggaccagcaatccccccacctttggagggggcaccaagctggaaatcaagagaacagtggctgccccctctgtgttcatcttcccaccctctgatgagcagctgaagtctggaacagcctctgttgtgtgcctgctgaacaacttctaccccagagaagccaaggtgcagtggaaggtggacaatgccctgcagtctggcaactcccaggaatctgtgacagagcaggacagcaaggactccacctactccctgagcagcaccctgaccctgagcaaggctgactatgagaagcacaaagtgtatgcctgtgaagtgacccaccagggcctgtccagccctgtgaccaagagcttcaacagaggggagagctgaagatctacttctggctaataaaagatcagagctctagtgatctgtgtgttggttttttgtgtctgcattctagctgttacataacttatggtaaatggcctgcctggctgactgcccaatgacccctgcccaatgatgtcaataatgatgtatgttcccatgtaatgccaatagggactttccattgatgtcaatgggtggagtatttatggtaactgcccacttggcagtacatcaagtgtatcatatgccaagtatgccccctattgatgtcaatgatggtaaatggcctgcctggcattatgcccagtacatgaccttatgggactttcctacttggcagtacatctatgtattagtcattgctattaccatggattagtggagaagagcatgcttgagggctgagtgcccctcagtgggcagagagcacatggcccacagtccctgagaagttggggggaggggtgggcaattgaactggtgcctagagaaggtggggcttgggtaaactgggaaagtgatgtggtgtactggctccacctttttccccagggtgggggagaaccatatataagtgcagtagtctctgtgaacattcaagcttctgccttctccctcctgtgagtttggatatcgtaagtcactgactgtctatgcctgggaaagggtgggcaggagatggggcagtgcaggaaaagtggcactatgaaccctgcagccctagacaattgtactaaccttcttctctttcctctcctgacaggttggtaaccaagccaccatggtcctccagacacaggtgttcatcagcctgctgctgtggatcagtggtgcctatggacaggtccagctgcaagagtctggccctggacttgtcagacccagccagacactgagcctgacctgtacagtctctggcttcagcctgaccagctactctgtgcactgggtcagacagcctccaggcagaggactggaatggctgggagtgatctgggccagtggtggcacagactacaactctgccctgatgagcagactgagcatcctgaaggacaacagcaagaaccaggtgtccctgagactgtcctctgtgacagctgctgatacagctgtgtacttctgtgccagagatcctcctagctctctgctgagactggactactggggccagggcacaacagtgacagtgtccagtgccagcacaaagggcccctctgtgtttcctctggctcccagcagcaagagcaccagtggtggaactgctgccctgggctgtctggtcaaggactactttcctgagcctgtgactgtgtcctggaactctggggctctgacatctggggtgcacacattccctgctgtgctgcaatcctctggcctgtacagcctcagctctgtggtcacagtgcctagctctagcctgggcacccagacctacatctgcaatgtgaaccacaagcctagcaacaccaaggtggacaagaaggctgagcccaagagctgtgacaagacccacacctgtcctccatgtcctgctccagagctgcttggaggacccagtgtgttcctgtttcctccaaagccaaaggacaccctgatgatcagcagaacccctgaagtgacctgtgtggtggtggatgtgtcccatgaggaccctgaagtcaagttcaattggtatgtggatggtgttgaggtgcacaatgccaagaccaagcctagagaggaacagtacaacagcacctacagagtggtgtcagtgctgacagtgctgcaccaggactggctgaatggcaaagagtacaagtgcaaggtgtccaacaaggccctgcctgctcctattgaaaagaccatcagcaaggccaagggccagcctagggaaccccaggtttacacactgccacctagcagagatgagctgaccaaaaatcaggtttccctgacctgcctggttaagggcttctacccctctgacattgctgtggaatgggagagcaatggccagcctgagaacaactacaagacaacccctcctgtgctggactctgatggctcattcttcctgtactccaagctgactgtggacaaaagcagatggcagcaaggcaatgtgttcagctgctctgtgatgcatgaggccctgcacaaccactacacccagaagtccctgtctctgagccctggcaagagaaagagaaggagtggctctggggccaccaactttagcctgctgaaacaggctggggatgttgaagagaaccctggacctatggtgctgcaaacccaggttttcatttctctgctcctctggattagtggtgcttatggggacattgtgatgacacagagccctagcagcctgtctgcctctgtgggagacagagtgaccatcacatgcaagtccagccagagtctgctgaactctggcaaccagaagaactacctggcctggtatcagcaaaagcctggcaaggcccctaagctgctcatctatggggccagcaccagagagtctggggtcccagatagattctctggctctggatctggcactgacttcaccttcaccatcagctccctgcaaccagaggacattgccacctactactgccagaatgtgcacagcttcccattcacctttggacagggcactaaggtggaaatcaagaggactgtggctgctccttctgtgttcatcttcccaccatcagatgaacagctgaagagtggcacagcctctgttgtgtgcctgctcaacaacttctaccctagagaagccaaggtgcagtggaaagtggacaatgccctccagtctggcaacagccaagaatctgtgactgagcaggactccaaggacagcacatacagcctgagcagcacactgaccctgagcaaggctgactatgagaagcacaaagtctatgcctgtgaagtgacacaccagggcctgtctagcccagtgaccaagtccttcaacaggggagagagctgaagatctacttctggctaataaaagatcagagctctagtgatctgtgtgttggttttttgtgtctgcattctagcaggagtcaatgggaaaaacccattggagccaagtacactgactcaatagggactttccattgggttttgcccagtacataaggtcaatagggggtgagtcaacaggaaagtcccattggagccaagtacattgagtcaatagggactttccaatgggttttgcccagtacataaggtcaatgggaggtaagccaatgggtttttcccattactgacatgtatactgagtcattagggactttccaatgggttttgcccagtacataaggtcaataggggtgaatcaacaggaaagtcccattggagccaagtacactgagtcaatagggactttccattgggttttgcccagtacaaaaggtcaatagggggtgagtcaatgggtttttcccattattggcacatacataaggtcaataggggtgactagtggagaagagcatgcttgagggctgagtgcccctcagtgggcagagagcacatggcccacagtccctgagaagttggggggaggggtgggcaattgaactggtgcctagagaaggtggggcttgggtaaactgggaaagtgatgtggtgtactggctccacctttttccccagggtgggggagaaccatatataagtgcagtagtctctgtgaacattcaagcttctgccttctccctcctgtgagtttggtaagtcactgactgtctatgcctgggaaagggtgggcaggagatggggcagtgcaggaaaagtggcactatgaaccctgcagccctagacaattgtactaaccttcttctctttcctctcctgacaggttggtaaccaagccaccatgggatggtccctgatcctgctgtttctggtggctgtggccaccagagtgctgtctgaagtgcagctggtggaatctggccctggcctggttaagccctctgacatcctgagcctgacctgtgctgtgtctggctacagcatcagcagcaactactactggggctggatcagacagcctcctggcaaaggcctggaatggattggcagcatctaccactctggctccacctactacaagcccagcctggaaagcagactgggcatctctgtggacaccagcaagaaccagttcagcctgaagctgagctttgtgtctgctgctgacactgctgtgtactactgtgccagacatgttaggagtggctaccctgacacagcctactactttgataagtggggccagggcaccctggtcacagtgtctgcttctacaaagggcccctctgtgttcccactggctcctagcagcaagagcaccagtggtggaacagctgccctgggctgtctggtcaaggactactttcctgagccagtgacagtgtcctggaactctggggctctgacttctggggtgcacacattccctgctgtgctccagtcctctggcctgtacagcctgtcctctgtggtcactgtgccaagctctagcctgggcacccagacctacatctgcaatgtgaaccacaagcctagcaacaccaaggtggacaagaaggctgagcccaagagctgtgacaagacccacacctgtcctccatgtcctgctccagagctgcttggaggaccttctgtgtttctgttccctccaaagccaaaggacaccctgatgatcagcagaacccctgaagtgacctgtgtggtggtggatgtgtcccatgaggacccagaagtgaagttcaattggtatgtggatggtgttgaggtgcacaatgccaagaccaagcctagagaggaacagtacaacagcacctacagggttgtgtcagtgctgactgtgctgcaccaggactggctgaatggcaaagagtacaagtgcaaggtgtccaacaaggccctgcctgctcctattgaaaagaccatcagcaaggccaagggacagcctagggaaccccaggtgtacacactgccacctagcagagatgagctgaccaagaatcaggtgtccctgacatgccttgtgaagggcttctacccttctgacattgcagtggaatgggagagcaatggccagcctgagaacaactacaagacaacccctcctgtgctggactctgatggctcattcttcctgtactccaagctgacagtggacaagtccagatggcagcaaggcaatgtgttcagctgctctgtgatgcatgaggccctgcacaaccactacacacagaagtccctgtctctgagccctggcaagagaaagagaaggagtggatctggggccaccaacttcagcctgctgaaacaggctggggatgttgaagagaaccctggacctatggcctgggctctgctgcttctgggactgctgtctcactgcacaggcagtgtgaccagctatgtgctgacccagcctccatctgtgtctgtggctccaggggagacagccagaatcagctgtggtggcaacaacattggcacaaaggtgctgcactggtatcagcagactccaggacaggcaccagtgctggtggtgtatgatgactctgacagaccctctggcatcccagagaggttctctggcagcaactctggcaacacagccacactgaccatctccagagtggaagttggagatgaggctgattactactgccaagtgtgggacatcagcacagaccaggctgtgtttggtggtggcaccaagctcactgtgctgggccaacctaaagctgccccttctgtgacactgttcccacctagctctgaggaactccaggctaacaaggccacacttgtgtgcctgatcagtgacttctacccaggggctgtgactgtggcctggaaggctgatagcagccctgtgaaggctggggttgagacaaccacacctagcaagcagagcaacaacaaatatgctgccagcagctacctgagtctgacccctgagcagtggaagtcccacagatcctacagctgtcaagtgacccatgagggctccacagtggaaaagacagtggcccctacagagtgctcctgaagatctacttctggctaataaaagatcagagctctagtgatctgtgtgttggttttttgtgtctgcattctagctctagtgatcagcagttcaacctgttgatagtatgtactaagctctcatgtttaatgtactaagctctcatgtttaatgaactaaaccctcatggctaatgtactaagctctcatggctaatgtactaagctctcatgtttcatgtactaagctctcatgtttgaacaataaaattaatataaatcagcaacttaaatagcctctaaggttttaagttttataagaaaaaaaagaatatataaggcttttaaaggttttaaggtttcctaggttatcctcatatgagctcttagaaaaactcatccagcatcaaatgaaactgcaatttattcatatcaggattatcaataccatatttttgaaaaagtcttttctgtaatgaaggagaaaactcacccaggcagttccataggatggcaagatcctggtatctgtctgcaattccaactcttccaacatcaatacaacctattaatttcccctcatcaaaaataaggttatcaagtgagaaatcaccatgagtgaccactgaatctggtgagaatggcaaaagattatgcatttctttccagacttgttcaacaggccagccatttctctcatcatcaaaatcactggcatcaaccaaaccattattcattcttgattgggcctgagccagtctaaatactctatcagagttaaaaggacaattacaaacaggaatggaatgcaatcttctcaggaacactgccagggcatcaacaatattttcacctgaatcaggatattcttccaatacctggaatgctgttttccctgggatggcagtggtgagtaaccatgcatcatcaggagttctgataaaatgcttgatggttggaagaggcataaattcagtcagccagtttagtctgaccatctcatctgtaacatcattggcaacagaacctttgccatgtttcagaaacaactctggggcatctggcttcccatacaatctatagattgtggcacctgattgcccaacattatctctagcccatttatacccatataaatcagcatccatgttggaatttaatcttggcctggagcaagaggtttctctttgaatatggctcatacatgtgcacctcctatagtgagttgtattatactatgcagatatactatgccaatgtttaattgtcag

SEQ ID NO: 30 - DNA, 9595 bp, synthetic construct
  source 1..9595: mol_type = other DNA; note = Synthetic
cactatgtgttaattaaaattatctctaaggcatgtgaactggctgtcttggttttcatctgtacttcatctgctacctctgtgacctgaaacatatttataattccattaagctgtgcatatgatagatttatcatatgtattttccttaaaggatttttgtaagaactaattgaattgatacctgtaaagtctttatcacactacccaataaataataaatctctttgttcagctctctgtttctataaatatgtaccagttttattgtttttagtggtagtgattttattctctttctatatatatacacacacatgtgtgcattcataaatatatacaatttttatgaataaaaaattattagcaatcaatattgaaaaccactgatttttgtttatgtgagcaaacagcagattaaaaggaatttgaattctcatagctagcaggagtcaatgggaaaaacccattggagccaagtacactgactcaatagggactttccattgggttttgcccagtacataaggtcaatagggggtgagtcaacaggaaagtcccattggagccaagtacattgagtcaatagggactttccaatgggttttgcccagtacataaggtcaatgggaggtaagccaatgggtttttcccattactgacatgtatactgagtcattagggactttccaatgggttttgcccagtacataaggtcaataggggtgaatcaacaggaaagtcccattggagccaagtacactgagtcaatagggactttccattgggttttgcccagtacaaaaggtcaatagggggtgagtcaatgggtttttcccattattggcacatacataaggtcaataggggtgactagtggagaagagcatgcttgagggctgagtgcccctcagtgggcagagagcacatggcccacagtccctgagaagttggggggaggggtgggcaattgaactggtgcctagagaaggtggggcttgggtaaactgggaaagtgatgtggtgtactggctccacctttttccccagggtgggggagaaccatatataagtgcagtagtctctgtgaacattcaagcttctgccttctccctcctgtgagtttggtaagtcactgactgtctatgcctgggaaagggtgggcaggagatggggcagtgcaggaaaagtggcactatgaaccctgcagccctagacaattgtactaaccttcttctctttcctctcctgacaggttggtaaccaagccaccatgggatggtccctgatcctgctgtttctggtggctgtggccaccagagtgctgtctgaagtgcagctggtggaaagtggtggtggcctggttcagcctggtggctctctgagactgagctgtgctgcctctggcttcattgtgtccagcaactacatgagctgggtcagacaggcccctggcaaaggactggaatgggtgtcagtgatctacagtggtggcagcacctactatgctgactctgtgaagggcagattcaccatcagcagacacaacagcaagaacaccctgtacctgcagatgaacagcctgagagctgaggacactgctgtgtactactgtgccagagaagcctatggcatggatgtgtggggccagggcacaacagtgactgtgtcctctgccagcacaaagggcccctctgtgtttcctctggctcccagcagcaagagcaccagtggtggaacagctgccctgggctgtctggtcaaggactactttcctgagcctgtgacagtgtcctggaactctggggctctgacatctggggtgcacacattccctgcagtgctgcagtcctctggcctgtacagcctgtcctctgtggtcacagtgcctagctctagcctgggcacccagacctacatctgcaatgtgaaccacaagcctagcaacaccaaggtggacaagaaggctgagcccaagagctgtgacaagacccacacctgtcctccatgtcctgctccagagctgcttggaggaccatcagtgtttctgttccctccaaagcctaaggacaccctgatgatcagcagaacccctgaagtgacctgtgtggtggttgatgtgtcccatgaggacccagaagtgaagttcaattggtatgtggatggtgttgaggtgcacaatgccaagaccaagcctagagaggaacagtacaactccacctacagagtggtttctgtgctgacagtgctccaccaggactggctgaatggcaaagagtacaagtgcaaggtgtccaacaaggccctgcctgctcctattgaaaagaccatctccaaggccaagggccagcctagggaaccccaggtttacacactgccacctagcagggatgagctgaccaagaaccaggtgtccctgacatgcctggttaagggcttctacccctctgacattgctgtggaatgggagagcaatggccagccagagaacaactacaagacaacccctcctgtgctggactctgatggctcattcttcctgtactccaagctgactgtggacaagtccagatggcagcagggcaatgtctttagctgctctgtgatgcatgaggccctgcacaaccactacacacagaagtccctgtctctgagccctggcaagagaaagagaaggagtggctctggggccaccaacttcagcctgctgaaacaggctggggatgttgaagagaaccctggacctatggcctgggctctgctgcttctgggactgctgtctcactgcactggctctgtgacagacattgtgatgacccagtctccatccttcctgagtgcctctgtgggagacagagtgaccatcacctgtagagccagccagggcatcagctcttacctggcttggtatcagcaaaagcctggcaaggcccctaagctgctgatctatgctgcctccacactgcagtcaggggtgccctccagattttctggctctggatctggcactgagttcaccctgaccatcagctccctgcagcctgaggactttgccacctactactgccagcagctgaacagctaccctccttacacctttggacagggcaccaagctggaaatcaagggaacaaagctgacagtcctgggccagccaaaggctgctccttctgtgacactgttcccacctagctctgaggaactgcaggctaacaaggctacccttgtgtgcctgatctctgacttctacccaggggctgtgactgtggcttggaaggctgatagcagccctgtgaaggctggggttgagacaaccacacctagcaagcagagcaacaacaaatatgctgccagctcctacctgagtctgacccctgagcagtggaagtcccacagatcctacagctgccaagtgacccatgagggctccacagtggaaaagacagtggccccaacagagtgctcctgaagatctacttctggctaataaaagatcagagctctagtgatctgtgtgttggttttttgtgtctgcattctagcagagccccactgtgttcatcttacagatggaaatactgacattcagaggagttagttaacttgcctaggtgattcagctaataagtgcaagaaagatttcaatccaaggtgatttgattctgaagcctgtgctaatcacattacaccaagctacaacttcatttataaataataagtcagctttcaagggcctttcaggtgtcctgcacttctacaagctgtgccatttagtgaacacaaaatgagccttctgatgaagtagtcttttcattatttcagatattagaacactaaaattcttagctgccagctgattgaaggctgggacaaaattcaaacatgcatctacaacaatatatatctcaatgttagtctccaaattctattgacttcaactcaagagaatataaagagctagtctttatacactctttaaggtatgatatcatctggaaagtaacaaaattgatgcaaatttgaatgaactttatcatggtgtatttacacaatgtgtttcttctccctgcaatgtatttctttctctaattccttccatttgatctttcatacacaatctggttctgatgtatgttttttggatgcacttttcaactccaaaagacagagctagttactttcttcctggtgctccaagcactgtatttgtatctgtattcaagccctttgcaatattgtactggatcattatttcacctctaggatggcttccccaggcaacttgtgttcacccagagactacattttgtatcttgttgacctttgaacttccaccagtgtctaaaaataatatgtatgcaaaattacttgctatgagaatgtataattaaacaatataaaaaggagaagcaaggagagaaacacaggtgtgtatttgtgtttgtgtgcttaaaaggcagtgtggaaaaggaagaaatgccatttatagtgaggagacaaagttatattacctcttatctggcttttaaggagattttgctgagctaaaaatcctatattcatagaaaagccttacctgagttgccaatacctcaattcagtctagctgttacataacttatggtaaatggcctgcctggctgactgcccaatgacccctgcccaatgatgtcaataatgatgtatgttcccatgtaatgccaatagggactttccattgatgtcaatgggtggagtatttatggtaactgcccacttggcagtacatcaagtgtatcatatgccaagtatgccccctattgatgtcaatgatggtaaatggcctgcctggcattatgcccagtacatgaccttatgggactttcctacttggcagtacatctatgtattagtcattgctattaccatggattagtggagaagagcatgcttgagggctgagtgcccctcagtgggcagagagcacatggcccacagtccctgagaagttggggggaggggtgggcaattgaactggtgcctagagaaggtggggcttgggtaaactgggaaagtgatgtggtgtactggctccacctttttccccagggtgggggagaaccatatataagtgcagtagtctctgtgaacattcaagcttctgccttctccctcctgtgagtttggatgcacctactagatatcttggtaagtcactgactgtctatgcctgggaaagggtgggcaggaggtggggcagtgcaggaaaagtggcactgtgaaccctgcagccctagacaattgtactaaccttcttctctttcctctcctgacaggttggtaaccaagccaccatgggctggtccctgatcctgctgttcctggtggctgtggccaccagagtgctgagccaggtgcagctgcagcagcctggggctgagcttgtgaaacctggggcctctgtgaagatgagctgcaaggcctctggctacaccttcaccagctacaacatgcactgggtcaagcagacccctggcagaggcctggaatggattggagccatctaccctggcaatggggacacctcctacaaccagaagttcaagggcaaggccaccctgacagctgacaagagcagcagcacagcctacatgcagctgtccagcctgacctctgaggactctgctgtgtactactgtgccaggtccacctactatgggggagactggtacttcaatgtgtggggagctggcaccacagtgacagtgtctgctgccagcaccaagggcccctctgtgtttcctctggcccccagcagcaagagcacctctgggggaacagctgccctgggctgccttgtgaaggactacttccctgagcctgtgactgtgtcctggaactctggggccctgacatctggggtgcacaccttccctgcagtgctgcagtccagtggcctgtactccctgtcctctgttgtgacagtgcccagctccagcctgggcacccagacctacatctgcaatgtgaaccacaagcccagcaacaccaaggtggacaagaaggctgagcccaagagctgtgacaagacccacacctgtcccccctgtcctgcccctgaactgctgggaggaccttctgtgttcctgttcccacccaagcccaaggataccctgatgatcagcagaacccctgaagtgacctgtgtggtggtggatgtgtcccatgaggacccagaagtgaagttcaattggtatgtggatggggtggaagtgcacaatgccaagaccaagcccagagaggaacagtacaacagcacctacagagtggtgtctgtgctgactgtgctgcaccaggactggctgaatggcaaagagtacaagtgcaaggtgtccaacaaggccctgccagcccccattgagaaaaccatcagcaaggccaagggccagcctagagaaccccaggtgtacacactgccccctagcagggatgagctgaccaagaaccaggtgtccctgacatgccttgtgaaaggcttctacccctctgacattgctgtggaatgggagagcaatggacagcctgagaacaactacaagaccaccccccctgtgctggactctgatggctcattcttcctgtacagcaagctgacagtggacaagtccagatggcagcagggcaatgtgttcagctgctctgtgatgcatgaggccctgcacaaccactacacccagaaaagcctgtccctgtcccctggcaagagaaagagaaggagtggaagtggagctactaacttcagcctgctgaagcaggctggagatgtggaggagaaccctggacctatggacttccaggtgcagatcatcagctttctgctgatctctgcctctgtgatcatgagcagaggccagattgtgctgagccagagccctgccatcctgtctgcaagccctggggagaaagtgaccatgacctgcagagccagcagctctgtgtcctacatccactggttccagcagaagcctggcagcagccccaagccttggatctatgccaccagcaacctggcatctggggtgccagtcagattctctggctctggatctggcaccagctacagcctgaccatcagcagagtggaagctgaggatgctgccacctactactgccagcagtggaccagcaatccccccacctttggagggggcaccaagctggaaatcaagagaacagtggctgccccctctgtgttcatcttcccaccctctgatgagcagctgaagtctggaacagcctctgttgtgtgcctgctgaacaacttctaccccagagaagccaaggtgcagtggaaggtggacaatgccctgcagtctggcaactcccaggaatctgtgacagagcaggacagcaaggactccacctactccctgagcagcaccctgaccctgagcaaggctgactatgagaagcacaaagtgtatgcctgtgaagtgacccaccagggcctgtccagccctgtgaccaagtccttcaacaggggagagtgttgaagatctacttctggctaataaaagatcagagctctagtgatctgtgtgttggttttttgtgtctgcattctagcagtcaatatgttcaccccaaaaaagctgtttgttaacttgtcaacctcattctaaaatgtatatagaagcccaaaagacaataacaaaaatattcttgtagaacaaaatgggaaagaatgttccactaaatatcaagatttagagcaaagcatgagatgtgtggggatagacagtgaggctgataaaatagagtagagctcagaaacagacccattgatatatgtaagtgacctatgaaaaaaatatggcattttacaatgggaaaatgatggtctttttcttttttagaaaaacagggaaatatatttatatgtaaaaaataaaagggaacccatatgtcataccatacacacaaaaaaattccagtgaattataagtctaaatggagaaggcaaaactttaaatcttttagaaaataatatagaagcatgccatcaagacttcagtgtagagaaaaatttcttatgactcaaagtcctaaccacaaagaaaagattgttaattagattgcatgaatattaagacttatttttaaaattaaaaaaccattaagaaaagtcaggccatagaatgacagaaaatatttgcaacaccccagtaaagagaattgtaatatgcagattataaaaagaagtcttacaaatcagtaaaaaataaaactagacaaaaatttgaacagatgaaagagaaactctaaataatcattacacatgagaaactcaatctcagaaatcagagaactatcattgcatatacactaaattagagaaatattaaaaggctaagtaacatctgtggcttaattaatctagctctagtgatcagcagttcaacctgttgatagtatgtactaagctctcatgtttaatgtactaagctctcatgtttaatgaactaaaccctcatggctaatgtactaagctctcatggctaatgtactaagctctcatgtttcatgtactaagctctcatgtttgaacaataaaattaatataaatcagcaacttaaatagcctctaaggttttaagttttataagaaaaaaaagaatatataaggcttttaaaggttttaaggtttcctaggttatcctcatatgagctcttagaaaaactcatccagcatcaaatgaaactgcaatttattcatatcaggattatcaataccatatttttgaaaaagtcttttctgtaatgaaggagaaaactcacccaggcagttccataggatggcaagatcctggtatctgtctgcaattccaactcttccaacatcaatacaacctattaatttcccctcatcaaaaataaggttatcaagtgagaaatcaccatgagtgaccactgaatctggtgagaatggcaaaagattatgcatttctttccagacttgttcaacaggccagccatttctctcatcatcaaaatcactggcatcaaccaaaccattattcattcttgattgggcctgagccagtctaaatactctatcagagttaaaaggacaattacaaacaggaatggaatgcaatcttctcaggaacactgccagggcatcaacaatattttcacctgaatcaggatattcttccaatacctggaatgctgttttccctgggatggcagtggtgagtaaccatgcatcatcaggagttctgataaaatgcttgatggttggaagaggcataaattcagtcagccagtttagtctgaccatctcatctgtaacatcattggcaacagaacctttgccatgtttcagaaacaactctggggcatctggcttcccatacaatctatagattgtggcacctgattgcccaacattatctctagcccatttatacccatataaatcagcatccatgttggaatttaatcttggcctggagcaagaggtttctctttgaatatggctcatacatgtgcacctcctatagtgagttgtattatactatgcagatatactatgccaatgtttaattgtcag

SEQ ID NO: 31 - DNA, 10391 bp, synthetic construct
  source 1..10391: mol_type = other DNA; note = Synthetic
cactatgtgaattggaattctcatagctagcaggagtcaatgggaaaaacccattggagccaagtacactgactcaatagggactttccattgggttttgcccagtacataaggtcaatagggggtgagtcaacaggaaagtcccattggagccaagtacattgagtcaatagggactttccaatgggttttgcccagtacataaggtcaatgggaggtaagccaatgggtttttcccattactgacatgtatactgagtcattagggactttccaatgggttttgcccagtacataaggtcaataggggtgaatcaacaggaaagtcccattggagccaagtacactgagtcaatagggactttccattgggttttgcccagtacaaaaggtcaatagggggtgagtcaatgggtttttcccattattggcacatacataaggtcaataggggtgactagtggagaagagcatgcttgagggctgagtgcccctcagtgggcagagagcacatggcccacagtccctgagaagttggggggaggggtgggcaattgaactggtgcctagagaaggtggggcttgggtaaactgggaaagtgatgtggtgtactggctccacctttttccccagggtgggggagaaccatatataagtgcagtagtctctgtgaacattcaagcttctgccttctccctcctgtgagtttggtaagtcactgactgtctatgcctgggaaagggtgggcaggagatggggcagtgcaggaaaagtggcactatgaaccctgcagccctagacaattgtactaaccttcttctctttcctctcctgacaggttggtaaccatgggctggtccctgatcctgctgttcctggtggctgtggccaccagagtgctgagccaggtgcagctgcagcagcctggggctgagcttgtgaaacctggggcctctgtgaagatgagctgcaaggcctctggctacaccttcaccagctacaacatgcactgggtcaagcagacccctggcagaggcctggaatggattggagccatctaccctggcaatggggacacctcctacaaccagaagttcaagggcaaggccaccctgacagctgacaagagcagcagcacagcctacatgcagctgtccagcctgacctctgaggactctgctgtgtactactgtgccaggtccacctactatgggggagactggtacttcaatgtgtggggagctggcaccacagtgacagtgtctgctgccagcaccaagggcccctctgtgtttcctctggcccccagcagcaagagcacctctgggggaacagctgccctgggctgccttgtgaaggactacttccctgagcctgtgactgtgtcctggaactctggggccctgacatctggggtgcacaccttccctgcagtgctgcagtccagtggcctgtactccctgtcctctgttgtgacagtgcccagctccagcctgggcacccagacctacatctgcaatgtgaaccacaagcccagcaacaccaaggtggacaagaaggctgagcccaagagctgtgacaagacccacacctgtcccccctgtcctgcccctgaactgctgggaggaccttctgtgttcctgttcccacccaagcccaaggataccctgatgatcagcagaacccctgaagtgacctgtgtggtggtggatgtgtcccatgaggacccagaagtgaagttcaattggtatgtggatggggtggaagtgcacaatgccaagaccaagcccagagaggaacagtacaacagcacctacagagtggtgtctgtgctgactgtgctgcaccaggactggctgaatggcaaagagtacaagtgcaaggtgtccaacaaggccctgccagcccccattgagaaaaccatcagcaaggccaagggccagcctagagaaccccaggtgtacacactgccccctagcagggatgagctgaccaagaaccaggtgtccctgacatgccttgtgaaaggcttctacccctctgacattgctgtggaatgggagagcaatggacagcctgagaacaactacaagaccaccccccctgtgctggactctgatggctcattcttcctgtacagcaagctgacagtggacaagtccagatggcagcagggcaatgtgttcagctgctctgtgatgcatgaggccctgcacaaccactacacccagaaaagcctgtccctgtcccctggcaagagaaagagaaggagtggaagtggagctactaacttcagcctgctgaagcaggctggagatgtggaggagaaccctggacctatggacttccaggtgcagatcatcagctttctgctgatctctgcctctgtgatcatgagcagaggccagattgtgctgagccagagccctgccatcctgtctgcaagccctggggagaaagtgaccatgacctgcagagccagcagctctgtgtcctacatccactggttccagcagaagcctggcagcagccccaagccttggatctatgccaccagcaacctggcatctggggtgccagtcagattctctggctctggatctggcaccagctacagcctgaccatcagcagagtggaagctgaggatgctgccacctactactgccagcagtggaccagcaatccccccacctttggagggggcaccaagctggaaatcaagagaacagtggctgccccctctgtgttcatcttcccaccctctgatgagcagctgaagtctggaacagcctctgttgtgtgcctgctgaacaacttctaccccagagaagccaaggtgcagtggaaggtggacaatgccctgcagtctggcaactcccaggaatctgtgacagagcaggacagcaaggactccacctactccctgagcagcaccctgaccctgagcaaggctgactatgagaagcacaaagtgtatgcctgtgaagtgacccaccagggcctgtccagccctgtgaccaagagcttcaacagaggggagagctgaagatctacttctggctaataaaagatcagagctctagtgatctgtgtgttggttttttgtgtctgcattctagctgttacataacttatggtaaatggcctgcctggctgactgcccaatgacccctgcccaatgatgtcaataatgatgtatgttcccatgtaatgccaatagggactttccattgatgtcaatgggtggagtatttatggtaactgcccacttggcagtacatcaagtgtatcatatgccaagtatgccccctattgatgtcaatgatggtaaatggcctgcctggcattatgcccagtacatgaccttatgggactttcctacttggcagtacatctatgtattagtcattgctattaccatggattagtggagaagagcatgcttgagggctgagtgcccctcagtgggcagagagcacatggcccacagtccctgagaagttggggggaggggtgggcaattgaactggtgcctagagaaggtggggcttgggtaaactgggaaagtgatgtggtgtactggctccacctttttccccagggtgggggagaaccatatataagtgcagtagtctctgtgaacattcaagcttctgccttctccctcctgtgagtttggatatcgtaagtcactgactgtctatgcctgggaaagggtgggcaggagatggggcagtgcaggaaaagtggcactatgaaccctgcagccctagacaattgtactaaccttcttctctttcctctcctgacaggttggtaaccaagccaccatggtcctccagacacaggtgttcatcagcctgctgctgtggatcagtggtgcctatggacaggtccagctgcaagagtctggccctggacttgtcagacccagccagacactgagcctgacctgtacagtctctggcttcagcctgaccagctactctgtgcactgggtcagacagcctccaggcagaggactggaatggctgggagtgatctgggccagtggtggcacagactacaactctgccctgatgagcagactgagcatcctgaaggacaacagcaagaaccaggtgtccctgagactgtcctctgtgacagctgctgatacagctgtgtacttctgtgccagagatcctcctagctctctgctgagactggactactggggccagggcacaacagtgacagtgtccagtgccagcacaaagggcccctctgtgtttcctctggctcccagcagcaagagcaccagtggtggaactgctgccctgggctgtctggtcaaggactactttcctgagcctgtgactgtgtcctggaactctggggctctgacatctggggtgcacacattccctgctgtgctgcaatcctctggcctgtacagcctcagctctgtggtcacagtgcctagctctagcctgggcacccagacctacatctgcaatgtgaaccacaagcctagcaacaccaaggtggacaagaaggctgagcccaagagctgtgacaagacccacacctgtcctccatgtcctgctccagagctgcttggaggacccagtgtgttcctgtttcctccaaagccaaaggacaccctgatgatcagcagaacccctgaagtgacctgtgtggtggtggatgtgtcccatgaggaccctgaagtcaagttcaattggtatgtggatggtgttgaggtgcacaatgccaagaccaagcctagagaggaacagtacaacagcacctacagagtggtgtcagtgctgacagtgctgcaccaggactggctgaatggcaaagagtacaagtgcaaggtgtccaacaaggccctgcctgctcctattgaaaagaccatcagcaaggccaagggccagcctagggaaccccaggtttacacactgccacctagcagagatgagctgaccaaaaatcaggtttccctgacctgcctggttaagggcttctacccctctgacattgctgtggaatgggagagcaatggccagcctgagaacaactacaagacaacccctcctgtgctggactctgatggctcattcttcctgtactccaagctgactgtggacaaaagcagatggcagcaaggcaatgtgttcagctgctctgtgatgcatgaggccctgcacaaccactacacccagaagtccctgtctctgagccctggcaagagaaagagaaggagtggctctggggccaccaactttagcctgctgaaacaggctggggatgttgaagagaaccctggacctatggtgctgcaaacccaggttttcatttctctgctcctctggattagtggtgcttatggggacattgtgatgacacagagccctagcagcctgtctgcctctgtgggagacagagtgaccatcacatgcaagtccagccagagtctgctgaactctggcaaccagaagaactacctggcctggtatcagcaaaagcctggcaaggcccctaagctgctcatctatggggccagcaccagagagtctggggtcccagatagattctctggctctggatctggcactgacttcaccttcaccatcagctccctgcaaccagaggacattgccacctactactgccagaatgtgcacagcttcccattcacctttggacagggcactaaggtggaaatcaagaggactgtggctgctccttctgtgttcatcttcccaccatcagatgaacagctgaagagtggcacagcctctgttgtgtgcctgctcaacaacttctaccctagagaagccaaggtgcagtggaaagtggacaatgccctccagtctggcaacagccaagaatctgtgactgagcaggactccaaggacagcacatacagcctgagcagcacactgaccctgagcaaggctgactatgagaagcacaaagtctatgcctgtgaagtgacacaccagggcctgtctagcccagtgaccaagtccttcaacaggggagagagctgaagatctacttctggctaataaaagatcagagctctagtgatctgtgtgttggttttttgtgtctgcattctagcaggagtcaatgggaaaaacccattggagccaagtacactgactcaatagggactttccattgggttttgcccagtacataaggtcaatagggggtgagtcaacaggaaagtcccattggagccaagtacattgagtcaatagggactttccaatgggttttgcccagtacataaggtcaatgggaggtaagccaatgggtttttcccattactgacatgtatactgagtcattagggactttccaatgggttttgcccagtacataaggtcaataggggtgaatcaacaggaaagtcccattggagccaagtacactgagtcaatagggactttccattgggttttgcccagtacaaaaggtcaatagggggtgagtcaatgggtttttcccattattggcacatacataaggtcaataggggtgactagtggagaagagcatgcttgagggctgagtgcccctcagtgggcagagagcacatggcccacagtccctgagaagttggggggaggggtgggcaattgaactggtgcctagagaaggtggggcttgggtaaactgggaaagtgatgtggtgtactggctccacctttttccccagggtgggggagaaccatatataagtgcagtagtctctgtgaacattcaagcttctgccttctccctcctgtgagtttggtaagtcactgactgtctatgcctgggaaagggtgggcaggagatggggcagtgcaggaaaagtggcactatgaaccctgcagccctagacaattgtactaaccttcttctctttcctctcctgacaggttggtaaccaagccaccatgggatggtccctgatcctgctgtttctggtggctgtggccaccagagtgctgtctgaagtgcagctggtggaatctggccctggcctggttaagccctctgacatcctgagcctgacctgtgctgtgtctggctacagcatcagcagcaactactactggggctggatcagacagcctcctggcaaaggcctggaatggattggcagcatctaccactctggctccacctactacaagcccagcctggaaagcagactgggcatctctgtggacaccagcaagaaccagttcagcctgaagctgagctttgtgtctgctgctgacactgctgtgtactactgtgccagacatgttaggagtggctaccctgacacagcctactactttgataagtggggccagggcaccctggtcacagtgtctgcttctacaaagggcccctctgtgttcccactggctcctagcagcaagagcaccagtggtggaacagctgccctgggctgtctggtcaaggactactttcctgagccagtgacagtgtcctggaactctggggctctgacttctggggtgcacacattccctgctgtgctccagtcctctggcctgtacagcctgtcctctgtggtcactgtgccaagctctagcctgggcacccagacctacatctgcaatgtgaaccacaagcctagcaacaccaaggtggacaagaaggctgagcccaagagctgtgacaagacccacacctgtcctccatgtcctgctccagagctgcttggaggaccttctgtgtttctgttccctccaaagccaaaggacaccctgatgatcagcagaacccctgaagtgacctgtgtggtggtggatgtgtcccatgaggacccagaagtgaagttcaattggtatgtggatggtgttgaggtgcacaatgccaagaccaagcctagagaggaacagtacaacagcacctacagggttgtgtcagtgctgactgtgctgcaccaggactggctgaatggcaaagagtacaagtgcaaggtgtccaacaaggccctgcctgctcctattgaaaagaccatcagcaaggccaagggacagcctagggaaccccaggtgtacacactgccacctagcagagatgagctgaccaagaatcaggtgtccctgacatgccttgtgaagggcttctacccttctgacattgcagtggaatgggagagcaatggccagcctgagaacaactacaagacaacccctcctgtgctggactctgatggctcattcttcctgtactccaagctgacagtggacaagtccagatggcagcaaggcaatgtgttcagctgctctgtgatgcatgaggccctgcacaaccactacacacagaagtccctgtctctgagccctggcaagagaaagagaaggagtggatctggggccaccaacttcagcctgctgaaacaggctggggatgttgaagagaaccctggacctatggcctgggctctgctgcttctgggactgctgtctcactgcacaggcagtgtgaccagctatgtgctgacccagcctccatctgtgtctgtggctccaggggagacagccagaatcagctgtggtggcaacaacattggcacaaaggtgctgcactggtatcagcagactccaggacaggcaccagtgctggtggtgtatgatgactctgacagaccctctggcatcccagagaggttctctggcagcaactctggcaacacagccacactgaccatctccagagtggaagttggagatgaggctgattactactgccaagtgtgggacatcagcacagaccaggctgtgtttggtggtggcaccaagctcactgtgctgggccaacctaaagctgccccttctgtgacactgttcccacctagctctgaggaactccaggctaacaaggccacacttgtgtgcctgatcagtgacttctacccaggggctgtgactgtggcctggaaggctgatagcagccctgtgaaggctggggttgagacaaccacacctagcaagcagagcaacaacaaatatgctgccagcagctacctgagtctgacccctgagcagtggaagtcccacagatcctacagctgtcaagtgacccatgagggctccacagtggaaaagacagtggcccctacagagtgctcctgaagatctacttctggctaataaaagatcagagctctagtgatctgtgtgttggttttttgtgtctgcattctagctctagtgatcagcagttcaacctgttgatagtatgtactaagctctcatgtttaatgtactaagctctcatgtttaatgaactaaaccctcatggctaatgtactaagctctcatggctaatgtactaagctctcatgtttcatgtactaagctctcatgtttgaacaataaaattaatataaatcagcaacttaaatagcctctaaggttttaagttttataagaaaaaaaagaatatataaggcttttaaaggttttaaggtttcctaggttatcctcatatgagctcttagaaaaactcatccagcatcaaatgaaactgcaatttattcatatcaggattatcaataccatatttttgaaaaagtcttttctgtaatgaaggagaaaactcacccaggcagttccataggatggcaagatcctggtatctgtctgcaattccaactcttccaacatcaatacaacctattaatttcccctcatcaaaaataaggttatcaagtgagaaatcaccatgagtgaccactgaatctggtgagaatggcaaaagattatgcatttctttccagacttgttcaacaggccagccatttctctcatcatcaaaatcactggcatcaaccaaaccattattcattcttgattgggcctgagccagtctaaatactctatcagagttaaaaggacaattacaaacaggaatggaatgcaatcttctcaggaacactgccagggcatcaacaatattttcacctgaatcaggatattcttccaatacctggaatgctgttttccctgggatggcagtggtgagtaaccatgcatcatcaggagttctgataaaatgcttgatggttggaagaggcataaattcagtcagccagtttagtctgaccatctcatctgtaacatcattggcaacagaacctttgccatgtttcagaaacaactctggggcatctggcttcccatacaatctatagattgtggcacctgattgcccaacattatctctagcccatttatacccatataaatcagcatccatgttggaatttaatcttggcctggagcaagaggtttctctttgaatatggctcatacatgtgcacctcctatagtgagttgtattatactatgcagatatactatgccaatgtttaattgtcag

SEQ ID NO: 32 - DNA, 4146 bp, synthetic construct
  source 1..4146: mol_type = other DNA; note = Synthetic
cactatgtggacatgaattcaattggctagcaggagtcaatgggaaaaacccattggagccaagtacactgactcaatagggactttccattgggttttgcccagtacataaggtcaatagggggtgagtcaacaggaaagtcccattggagccaagtacattgagtcaatagggactttccaatgggttttgcccagtacataaggtcaatgggaggtaagccaatgggtttttcccattactgacatgtatactgagtcattagggactttccaatgggttttgcccagtacataaggtcaataggggtgaatcaacaggaaagtcccattggagccaagtacactgagtcaatagggactttccattgggttttgcccagtacaaaaggtcaatagggggtgagtcaatgggtttttcccattattggcacatacataaggtcaataggggtgactagtggagaagagcatgcttgagggctgagtgcccctcagtgggcagagagcacatggcccacagtccctgagaagttggggggaggggtgggcaattgaactggtgcctagagaaggtggggcttgggtaaactgggaaagtgatgtggtgtactggctccacctttttccccagggtgggggagaaccatatataagtgcagtagtctctgtgaacattcaagcttctgccttctccctcctgtgagtttggtaagtcactgactgtctatgcctgggaaagggtgggcaggagatggggcagtgcaggaaaagtggcactatgaaccctgcagccctagacaattgtactaaccttcttctctttcctctcctgacaggttggtaaccaagccaccatgcagctgagaaaccctgagctgcacctgggctgtgctctggccctgagatttctggctctggtgtcctgggacatccctggtgctagagccctggataatggcctggccagaacacctacaatgggctggctgcactgggagagattcatgtgcaacctggactgccaagaggaacctgacagctgcatctctgagaagctgttcatggaaatggctgagctgatggtgtctgaaggctggaaggatgctggctatgagtacctgtgcattgatgactgctggatggcccctcagagagactctgaaggcagactccaggctgaccctcagaggttccctcatggcatcagacagctggccaactatgtgcacagcaagggcctgaagctgggcatctatgctgatgtgggcaacaagacctgtgctggcttccctggcagctttggctactatgacattgatgcccagacctttgctgactggggagttgacctgctgaagtttgatggctgctactgtgacagcctggaaaacctggctgatggctacaagcacatgagcctggctctgaacagaacaggcagatccattgtgtacagctgtgaatggcccctgtacatgtggcccttccagaagcctaactacacagagatcagacagtactgcaaccattggaggaactttgctgatattgatgatagctggaagtccatcaagagcatcctggactggaccagcttcaatcaagaaaggattgtggatgtggctggccctggtggctggaatgaccctgacatgctggtcattggcaactttggcctgagctggaaccagcaagtgacccagatggccctgtgggccattatggctgcccctctgttcatgagcaatgacctgagacacatcagccctcaggctaaggccctgctccaggacaaggatgtgattgctatcaatcaggaccctctgggcaagcagggctaccagcttagacagggagacaactttgaagtgtgggaaagacccctgtctggcctggcttgggctgttgccatgatcaacagacaagagattggaggccccaggtcctacaccattgctgtggccagccttggcaaaggggttgcctgtaatcctgcctgcttcatcacccagctgctgcctgtgaagagaaagctgggcttttatgagtggaccagcagactgagaagccacatcaaccccacaggcacagtgctgctgcaactggaaaacacaatgcagatgtccctgaaggacctgctgggtggaggaggtagtagaaacacaggcagaggtggagaggaaaagaagaaagagaaagaaaaagaggaacaagaggaaagggaaactaagacccctgagtgccccagccacacacagcctctgggagtgttcctgtttcctccaaagccaaaggacaccctgatgatcagcagaacccctgaagtgacctgtgtggtggtggatgtgtcccaagaggacccagaggtgcagttcaattggtatgtggatggtgttgaggtgcacaatgccaagaccaagcctagagaggaacagttcaacagcacctacagagtggtgtctgtgctgacagtgctgcaccaggactggctgaatggcaaagagtacaagtgcaaggtgtccaacaagggcctgcctagcagcattgaaaagaccatcagcaaggccaagggccagccaagagaaccccaggtgtacacactgcctccaagccaagaagagatgaccaagaaccaggtgtccctgacctgcctggtcaagggcttctacccctctgacattgctgtggaatgggagagcaatggccagcctgagaacaactacaagaccacacctcctgtgctggactctgatggctcattcttcctgtacagcagactgacagtggacaagagcagatggcaagagggcaatgtgttcagctgctctgtgatgcatgaggccctgcacaaccactacacccagaagtctctgagcctgagcctgggcaaatgaagatctacttctggctaataaaagatcagagctctagtgatctgtgtgttggttttttgtgtctgcattctagctctagtgatcagcagttcaacctgttgatagtatgtactaagctctcatgtttaatgtactaagctctcatgtttaatgaactaaaccctcatggctaatgtactaagctctcatggctaatgtactaagctctcatgtttcatgtactaagctctcatgtttgaacaataaaattaatataaatcagcaacttaaatagcctctaaggttttaagttttataagaaaaaaaagaatatataaggcttttaaaggttttaaggtttcctaggttatcctcatatgagctcttagaaaaactcatccagcatcaaatgaaactgcaatttattcatatcaggattatcaataccatatttttgaaaaagtcttttctgtaatgaaggagaaaactcacccaggcagttccataggatggcaagatcctggtatctgtctgcaattccaactcttccaacatcaatacaacctattaatttcccctcatcaaaaataaggttatcaagtgagaaatcaccatgagtgaccactgaatctggtgagaatggcaaaagattatgcatttctttccagacttgttcaacaggccagccatttctctcatcatcaaaatcactggcatcaaccaaaccattattcattcttgattgggcctgagccagtctaaatactctatcagagttaaaaggacaattacaaacaggaatggaatgcaatcttctcaggaacactgccagggcatcaacaatattttcacctgaatcaggatattcttccaatacctggaatgctgttttccctgggatggcagtggtgagtaaccatgcatcatcaggagttctgataaaatgcttgatggttggaagaggcataaattcagtcagccagtttagtctgaccatctcatctgtaacatcattggcaacagaacctttgccatgtttcagaaacaactctggggcatctggcttcccatacaatctatagattgtggcacctgattgcccaacattatctctagcccatttatacccatataaatcagcatccatgttggaatttaatcttggcctggagcaagaggtttctctttgaatatggctcatacatgtgcacctcctatagtgagttgtattatactatgcagatatactatgccaatgtttaattgtcag

SEQ ID NO: 33 - DNA, 3953 bp, synthetic construct
  source 1..3953: mol_type = other DNA; note = Synthetic
cactatgtgttaattaaaattatctctaaggcatgtgaactggctgtcttggttttcatctgtacttcatctgctacctctgtgacctgaaacatatttataattccattaagctgtgcatatgatagatttatcatatgtattttccttaaaggatttttgtaagaactaattgaattgatacctgtaaagtctttatcacactacccaataaataataaatctctttgttcagctctctgtttctataaatatgtaccagttttattgtttttagtggtagtgattttattctctttctatatatatacacacacatgtgtgcattcataaatatatacaatttttatgaataaaaaattattagcaatcaatattgaaaaccactgatttttgtttatgtgagcaaacagcagattaaaaggaatttgaattctcatagctagcaggagtcaatgggaaaaacccattggagccaagtacactgactcaatagggactttccattgggttttgcccagtacataaggtcaatagggggtgagtcaacaggaaagtcccattggagccaagtacattgagtcaatagggactttccaatgggttttgcccagtacataaggtcaatgggaggtaagccaatgggtttttcccattactgacatgtatactgagtcattagggactttccaatgggttttgcccagtacataaggtcaataggggtgaatcaacaggaaagtcccattggagccaagtacactgagtcaatagggactttccattgggttttgcccagtacaaaaggtcaatagggggtgagtcaatgggtttttcccattattggcacatacataaggtcaataggggtgactagtggagaagagcatgcttgagggctgagtgcccctcagtgggcagagagcacatggcccacagtccctgagaagttggggggaggggtgggcaattgaactggtgcctagagaaggtggggcttgggtaaactgggaaagtgatgtggtgtactggctccacctttttccccagggtgggggagaaccatatataagtgcagtagtctctgtgaacattcaagcttctgccttctccctcctgtgagtttggtaagtcactgactgtctatgcctgggaaagggtgggcaggagatggggcagtgcaggaaaagtggcactatgaaccctgcagccctagacaattgtactaaccttcttctctttcctctcctgacaggttggtaaccaagccaccatggctggacctgccacccagagccccatgaagctgatggccctgcagctgctgctgtggcacagtgcactctggacagtgcaggaagccacccccctgggccctgccagctccctgccccagagcttcctgctcaagtgcttagagcaagtgaggaagatccagggggatggggcagctctccaggagaagctgtgtgccacctacaagctgtgccaccctgaggagctggtgctgctgggacactctctgggcatcccctgggctcccctgagcagctgccccagccaggccctgcagctggcaggctgcttgagccaactccatagtggccttttcctctaccaggggctcctgcaggccctggaagggatctcccctgagttgggtcccaccttggacacactgcagctggatgttgctgactttgccaccaccatctggcagcagatggaagaactgggaatggcccctgccctgcagcccacccagggtgccatgcctgcctttgcctctgctttccagagaagggcaggaggggtcctggttgcctcccatctgcagagcttcctggaggtgtcctacagagttctaagacaccttgcccagccctgatagatctacttctggctaataaaagatcagagctctagtgatctgtgtgttggttttttgtgtctgcattctagcaagtcaatatgttcaccccaaaaaagctgtttgttaacttgtcaacctcattctaaaatgtatatagaagcccaaaagacaataacaaaaatattcttgtagaacaaaatgggaaagaatgttccactaaatatcaagatttagagcaaagcatgagatgtgtggggatagacagtgaggctgataaaatagagtagagctcagaaacagacccattgatatatgtaagtgacctatgaaaaaaatatggcattttacaatgggaaaatgatggtctttttcttttttagaaaaacagggaaatatatttatatgtaaaaaataaaagggaacccatatgtcataccatacacacaaaaaaattccagtgaattataagtctaaatggagaaggcaaaactttaaatcttttagaaaataatatagaagcatgccatcaagacttcagtgtagagaaaaatttcttatgactcaaagtcctaaccacaaagaaaagattgttaattagattgcatgaatattaagacttatttttaaaattaaaaaaccattaagaaaagtcaggccatagaatgacagaaaatatttgcaacaccccagtaaagagaattgtaatatgcagattataaaaagaagtcttacaaatcagtaaaaaataaaactagacaaaaatttgaacagatgaaagagaaactctaaataatcattacacatgagaaactcaatctcagaaatcagagaactatcattgcatatacactaaattagagaaatattaaaaggctaagtaacatctgtggcttaattaatctagctctagtgatcagcagttcaacctgttgatagtatgtactaagctctcatgtttaatgtactaagctctcatgtttaatgaactaaaccctcatggctaatgtactaagctctcatggctaatgtactaagctctcatgtttcatgtactaagctctcatgtttgaacaataaaattaatataaatcagcaacttaaatagcctctaaggttttaagttttataagaaaaaaaagaatatataaggcttttaaaggttttaaggtttcctaggttatcctcatatgagctcttagaaaaactcatccagcatcaaatgaaactgcaatttattcatatcaggattatcaataccatatttttgaaaaagtcttttctgtaatgaaggagaaaactcacccaggcagttccataggatggcaagatcctggtatctgtctgcaattccaactcttccaacatcaatacaacctattaatttcccctcatcaaaaataaggttatcaagtgagaaatcaccatgagtgaccactgaatctggtgagaatggcaaaagattatgcatttctttccagacttgttcaacaggccagccatttctctcatcatcaaaatcactggcatcaaccaaaccattattcattcttgattgggcctgagccagtctaaatactctatcagagttaaaaggacaattacaaacaggaatggaatgcaatcttctcaggaacactgccagggcatcaacaatattttcacctgaatcaggatattcttccaatacctggaatgctgttttccctgggatggcagtggtgagtaaccatgcatcatcaggagttctgataaaatgcttgatggttggaagaggcataaattcagtcagccagtttagtctgaccatctcatctgtaacatcattggcaacagaacctttgccatgtttcagaaacaactctggggcatctggcttcccatacaatctatagattgtggcacctgattgcccaacattatctctagcccatttatacccatataaatcagcatccatgttggaatttaatcttggcctggagcaagaggtttctctttgaatatggctcatacatgtgcacctcctatagtgagttgtattatactatgcagatatactatgccaatgtttaattgtcag

SEQ ID NO: 34 - DNA, 5011 bp, synthetic construct
  source 1..5011: mol_type = other DNA; note = Synthetic
cactatgtggacatgaattcaattggctagcaggagtcaatgggaaaaacccattggagccaagtacactgactcaatagggactttccattgggttttgcccagtacataaggtcaatagggggtgagtcaacaggaaagtcccattggagccaagtacattgagtcaatagggactttccaatgggttttgcccagtacataaggtcaatgggaggtaagccaatgggtttttcccattactgacatgtatactgagtcattagggactttccaatgggttttgcccagtacataaggtcaataggggtgaatcaacaggaaagtcccattggagccaagtacactgagtcaatagggactttccattgggttttgcccagtacaaaaggtcaatagggggtgagtcaatgggtttttcccattattggcacatacataaggtcaataggggtgactagtggagaagagcatgcttgagggctgagtgcccctcagtgggcagagagcacatggcccacagtccctgagaagttggggggaggggtgggcaattgaactggtgcctagagaaggtggggcttgggtaaactgggaaagtgatgtggtgtactggctccacctttttccccagggtgggggagaaccatatataagtgcagtagtctctgtgaacattcaagcttctgccttctccctcctgtgagtttggtaagtcactgactgtctatgcctgggaaagggtgggcaggagatggggcagtgcaggaaaagtggcactatgaaccctgcagccctagacaattgtactaaccttcttctctttcctctcctgacaggttggtaaccaagccaccatgggctggtccctgatcctgctgttcctggtggctgtggccaccagagtgctgagccaggtgcagctgcagcagcctggggctgagcttgtgaaacctggggcctctgtgaagatgagctgcaaggcctctggctacaccttcaccagctacaacatgcactgggtcaagcagacccctggcagaggcctggaatggattggagccatctaccctggcaatggggacacctcctacaaccagaagttcaagggcaaggccaccctgacagctgacaagagcagcagcacagcctacatgcagctgtccagcctgacctctgaggactctgctgtgtactactgtgccaggtccacctactatgggggagactggtacttcaatgtgtggggagctggcaccacagtgacagtgtctgctgccagcaccaagggcccctctgtgtttcctctggcccccagcagcaagagcacctctgggggaacagctgccctgggctgccttgtgaaggactacttccctgagcctgtgactgtgtcctggaactctggggccctgacatctggggtgcacaccttccctgcagtgctgcagtccagtggcctgtactccctgtcctctgttgtgacagtgcccagctccagcctgggcacccagacctacatctgcaatgtgaaccacaagcccagcaacaccaaggtggacaagaaggctgagcccaagagctgtgacaagacccacacctgtcccccctgtcctgcccctgaactgctgggaggaccttctgtgttcctgttcccacccaagcccaaggataccctgatgatcagcagaacccctgaagtgacctgtgtggtggtggatgtgtcccatgaggacccagaagtgaagttcaattggtatgtggatggggtggaagtgcacaatgccaagaccaagcccagagaggaacagtacaacagcacctacagagtggtgtctgtgctgactgtgctgcaccaggactggctgaatggcaaagagtacaagtgcaaggtgtccaacaaggccctgccagcccccattgagaaaaccatcagcaaggccaagggccagcctagagaaccccaggtgtacacactgccccctagcagggatgagctgaccaagaaccaggtgtccctgacatgccttgtgaaaggcttctacccctctgacattgctgtggaatgggagagcaatggacagcctgagaacaactacaagaccaccccccctgtgctggactctgatggctcattcttcctgtacagcaagctgacagtggacaagtccagatggcagcagggcaatgtgttcagctgctctgtgatgcatgaggccctgcacaaccactacacccagaaaagcctgtccctgtcccctggcaagtgaagatctacttctggctaataaaagatcagagctctagtgatctgtgtgttggttttttgtgtctgcattctagctgttacataacttatggtaaatggcctgcctggctgactgcccaatgacccctgcccaatgatgtcaataatgatgtatgttcccatgtaatgccaatagggactttccattgatgtcaatgggtggagtatttatggtaactgcccacttggcagtacatcaagtgtatcatatgccaagtatgccccctattgatgtcaatgatggtaaatggcctgcctggcattatgcccagtacatgaccttatgggactttcctacttggcagtacatctatgtattagtcattgctattaccatggattagtggagaagagcatgcttgagggctgagtgcccctcagtgggcagagagcacatggcccacagtccctgagaagttggggggaggggtgggcaattgaactggtgcctagagaaggtggggcttgggtaaactgggaaagtgatgtggtgtactggctccacctttttccccagggtgggggagaaccatatataagtgcagtagtctctgtgaacattcaagcttctgccttctccctcctgtgagtttggatatcgtaagtcactgactgtctatgcctgggaaagggtgggcaggagatggggcagtgcaggaaaagtggcactatgaaccctgcagccctagacaattgtactaaccttcttctctttcctctcctgacaggttggtaaccaagccaccatggacttccaggtgcagatcatcagctttctgctgatctctgcctctgtgatcatgagcagaggccagattgtgctgagccagagccctgccatcctgtctgcaagccctggggagaaagtgaccatgacctgcagagccagcagctctgtgtcctacatccactggttccagcagaagcctggcagcagccccaagccttggatctatgccaccagcaacctggcatctggggtgccagtcagattctctggctctggatctggcaccagctacagcctgaccatcagcagagtggaagctgaggatgctgccacctactactgccagcagtggaccagcaatccccccacctttggagggggcaccaagctggaaatcaagagaacagtggctgccccctctgtgttcatcttcccaccctctgatgagcagctgaagtctggaacagcctctgttgtgtgcctgctgaacaacttctaccccagagaagccaaggtgcagtggaaggtggacaatgccctgcagtctggcaactcccaggaatctgtgacagagcaggacagcaaggactccacctactccctgagcagcaccctgaccctgagcaaggctgactatgagaagcacaaagtgtatgcctgtgaagtgacccaccagggcctgtccagccctgtgaccaagagcttcaacagaggggagagctgaagatctacttctggctaataaaagatcagagctctagtgatctgtgtgttggttttttgtgtctgcattctagctctagtgatcagcagttcaacctgttgatagtatgtactaagctctcatgtttaatgtactaagctctcatgtttaatgaactaaaccctcatggctaatgtactaagctctcatggctaatgtactaagctctcatgtttcatgtactaagctctcatgtttgaacaataaaattaatataaatcagcaacttaaatagcctctaaggttttaagttttataagaaaaaaaagaatatataaggcttttaaaggttttaaggtttcctaggttatcctcatatgagctcttagaaaaactcatccagcatcaaatgaaactgcaatttattcatatcaggattatcaataccatatttttgaaaaagtcttttctgtaatgaaggagaaaactcacccaggcagttccataggatggcaagatcctggtatctgtctgcaattccaactcttccaacatcaatacaacctattaatttcccctcatcaaaaataaggttatcaagtgagaaatcaccatgagtgaccactgaatctggtgagaatggcaaaagattatgcatttctttccagacttgttcaacaggccagccatttctctcatcatcaaaatcactggcatcaaccaaaccattattcattcttgattgggcctgagccagtctaaatactctatcagagttaaaaggacaattacaaacaggaatggaatgcaatcttctcaggaacactgccagggcatcaacaatattttcacctgaatcaggatattcttccaatacctggaatgctgttttccctgggatggcagtggtgagtaaccatgcatcatcaggagttctgataaaatgcttgatggttggaagaggcataaattcagtcagccagtttagtctgaccatctcatctgtaacatcattggcaacagaacctttgccatgtttcagaaacaactctggggcatctggcttcccatacaatctatagattgtggcacctgattgcccaacattatctctagcccatttatacccatataaatcagcatccatgttggaatttaatcttggcctggagcaagaggtttctctttgaatatggctcatacatgtgcacctcctatagtgagttgtattatactatgcagatatactatgccaatgtttaattgtcag

SEQ ID NO: 35 - DNA, 7288 bp, synthetic construct
  source 1..7288: mol_type = other DNA; note = Synthetic
cactatgtggacatgaattcaattggctagctgttacataacttatggtaaatggcctgcctggctgactgcccaatgacccctgcccaatgatgtcaataatgatgtatgttcccatgtaatgccaatagggactttccattgatgtcaatgggtggagtatttatggtaactgcccacttggcagtacatcaagtgtatcatatgccaagtatgccccctattgatgtcaatgatggtaaatggcctgcctggcattatgcccagtacatgaccttatgggactttcctacttggcagtacatctatgtattagtcattgctattaccatggattagtggagaagagcatgcttgagggctgagtgcccctcagtgggcagagagcacatggcccacagtccctgagaagttggggggaggggtgggcaattgaactggtgcctagagaaggtggggcttgggtaaactgggaaagtgatgtggtgtactggctccacctttttccccagggtgggggagaaccatatataagtgcagtagtctctgtgaacattcaagcttctgccttctccctcctgtgagtttggatatcgtaagtcactgactgtctatgcctgggaaagggtgggcaggagatggggcagtgcaggaaaagtggcactatgaaccctgcagccctagacaattgtactaaccttcttctctttcctctcctgacaggttggtaaccaagccaccatgggctggtccctgatcctgctgttcctggtggctgtggccaccagagtgctgagccaggtgcagctgcagcagcctggggctgagcttgtgaaacctggggcctctgtgaagatgagctgcaaggcctctggctacaccttcaccagctacaacatgcactgggtcaagcagacccctggcagaggcctggaatggattggagccatctaccctggcaatggggacacctcctacaaccagaagttcaagggcaaggccaccctgacagctgacaagagcagcagcacagcctacatgcagctgtccagcctgacctctgaggactctgctgtgtactactgtgccaggtccacctactatgggggagactggtacttcaatgtgtggggagctggcaccacagtgacagtgtctgctgccagcaccaagggcccctctgtgtttcctctggcccccagcagcaagagcacctctgggggaacagctgccctgggctgccttgtgaaggactacttccctgagcctgtgactgtgtcctggaactctggggccctgacatctggggtgcacaccttccctgcagtgctgcagtccagtggcctgtactccctgtcctctgttgtgacagtgcccagctccagcctgggcacccagacctacatctgcaatgtgaaccacaagcccagcaacaccaaggtggacaagaaggctgagcccaagagctgtgacaagacccacacctgtcccccctgtcctgcccctgaactgctgggaggaccttctgtgttcctgttcccacccaagcccaaggataccctgatgatcagcagaacccctgaagtgacctgtgtggtggtggatgtgtcccatgaggacccagaagtgaagttcaattggtatgtggatggggtggaagtgcacaatgccaagaccaagcccagagaggaacagtacaacagcacctacagagtggtgtctgtgctgactgtgctgcaccaggactggctgaatggcaaagagtacaagtgcaaggtgtccaacaaggccctgccagcccccattgagaaaaccatcagcaaggccaagggccagcctagagaaccccaggtgtacacactgccccctagcagggatgagctgaccaagaaccaggtgtccctgacatgccttgtgaaaggcttctacccctctgacattgctgtggaatgggagagcaatggacagcctgagaacaactacaagaccaccccccctgtgctggactctgatggctcattcttcctgtacagcaagctgacagtggacaagtccagatggcagcagggcaatgtgttcagctgctctgtgatgcatgaggccctgcacaaccactacacccagaaaagcctgtccctgtcccctggcaagagaaagagaaggagtggaagtggagctactaacttcagcctgctgaagcaggctggagatgtggaggagaaccctggacctatggacttccaggtgcagatcatcagctttctgctgatctctgcctctgtgatcatgagcagaggccagattgtgctgagccagagccctgccatcctgtctgcaagccctggggagaaagtgaccatgacctgcagagccagcagctctgtgtcctacatccactggttccagcagaagcctggcagcagccccaagccttggatctatgccaccagcaacctggcatctggggtgccagtcagattctctggctctggatctggcaccagctacagcctgaccatcagcagagtggaagctgaggatgctgccacctactactgccagcagtggaccagcaatccccccacctttggagggggcaccaagctggaaatcaagagaacagtggctgccccctctgtgttcatcttcccaccctctgatgagcagctgaagtctggaacagcctctgttgtgtgcctgctgaacaacttctaccccagagaagccaaggtgcagtggaaggtggacaatgccctgcagtctggcaactcccaggaatctgtgacagagcaggacagcaaggactccacctactccctgagcagcaccctgaccctgagcaaggctgactatgagaagcacaaagtgtatgcctgtgaagtgacccaccagggcctgtccagccctgtgaccaagagcttcaacagaggggagagctgaagatctacttctggctaataaaagatcagagctctagtgatctgtgtgttggttttttgtgtctgcattctagcaggagtcaatgggaaaaacccattggagccaagtacactgactcaatagggactttccattgggttttgcccagtacataaggtcaatagggggtgagtcaacaggaaagtcccattggagccaagtacattgagtcaatagggactttccaatgggttttgcccagtacataaggtcaatgggaggtaagccaatgggtttttcccattactgacatgtatactgagtcattagggactttccaatgggttttgcccagtacataaggtcaataggggtgaatcaacaggaaagtcccattggagccaagtacactgagtcaatagggactttccattgggttttgcccagtacaaaaggtcaatagggggtgagtcaatgggtttttcccattattggcacatacataaggtcaataggggtgactagtggagaagagcatgcttgagggctgagtgcccctcagtgggcagagagcacatggcccacagtccctgagaagttggggggaggggtgggcaattgaactggtgcctagagaaggtggggcttgggtaaactgggaaagtgatgtggtgtactggctccacctttttccccagggtgggggagaaccatatataagtgcagtagtctctgtgaacattcaagcttctgccttctccctcctgtgagtttggtaagtcactgactgtctatgcctgggaaagggtgggcaggagatggggcagtgcaggaaaagtggcactatgaaccctgcagccctagacaattgtactaaccttcttctctttcctctcctgacaggttggtaaccaagccaccatgggctggtccctgatcctgctgttcctggtggctgtggccaccagagtgctgagccaggtgcagctgcagcagcctggggctgagcttgtgaaacctggggcctctgtgaagatgagctgcaaggcctctggctacaccttcaccagctacaacatgcactgggtcaagcagacccctggcagaggcctggaatggattggagccatctaccctggcaatggggacacctcctacaaccagaagttcaagggcaaggccaccctgacagctgacaagagcagcagcacagcctacatgcagctgtccagcctgacctctgaggactctgctgtgtactactgtgccaggtccacctactatgggggagactggtacttcaatgtgtggggagctggcaccacagtgacagtgtctgctgccagcaccaagggcccctctgtgtttcctctggcccccagcagcaagagcacctctgggggaacagctgccctgggctgccttgtgaaggactacttccctgagcctgtgactgtgtcctggaactctggggccctgacatctggggtgcacaccttccctgcagtgctgcagtccagtggcctgtactccctgtcctctgttgtgacagtgcccagctccagcctgggcacccagacctacatctgcaatgtgaaccacaagcccagcaacaccaaggtggacaagaaggctgagcccaagagctgtgacaagacccacacctgtcccccctgtcctgcccctgaactgctgggaggaccttctgtgttcctgttcccacccaagcccaaggataccctgatgatcagcagaacccctgaagtgacctgtgtggtggtggatgtgtcccatgaggacccagaagtgaagttcaattggtatgtggatggggtggaagtgcacaatgccaagaccaagcccagagaggaacagtacaacagcacctacagagtggtgtctgtgctgactgtgctgcaccaggactggctgaatggcaaagagtacaagtgcaaggtgtccaacaaggccctgccagcccccattgagaaaaccatcagcaaggccaagggccagcctagagaaccccaggtgtacacactgccccctagcagggatgagctgaccaagaaccaggtgtccctgacatgccttgtgaaaggcttctacccctctgacattgctgtggaatgggagagcaatggacagcctgagaacaactacaagaccaccccccctgtgctggactctgatggctcattcttcctgtacagcaagctgacagtggacaagtccagatggcagcagggcaatgtgttcagctgctctgtgatgcatgaggccctgcacaaccactacacccagaaaagcctgtccctgtcccctggcaagagaaagagaaggagtggaagtggagctactaacttcagcctgctgaagcaggctggagatgtggaggagaaccctggacctatggacttccaggtgcagatcatcagctttctgctgatctctgcctctgtgatcatgagcagaggccagattgtgctgagccagagccctgccatcctgtctgcaagccctggggagaaagtgaccatgacctgcagagccagcagctctgtgtcctacatccactggttccagcagaagcctggcagcagccccaagccttggatctatgccaccagcaacctggcatctggggtgccagtcagattctctggctctggatctggcaccagctacagcctgaccatcagcagagtggaagctgaggatgctgccacctactactgccagcagtggaccagcaatccccccacctttggagggggcaccaagctggaaatcaagagaacagtggctgccccctctgtgttcatcttcccaccctctgatgagcagctgaagtctggaacagcctctgttgtgtgcctgctgaacaacttctaccccagagaagccaaggtgcagtggaaggtggacaatgccctgcagtctggcaactcccaggaatctgtgacagagcaggacagcaaggactccacctactccctgagcagcaccctgaccctgagcaaggctgactatgagaagcacaaagtgtatgcctgtgaagtgacccaccagggcctgtccagccctgtgaccaagagcttcaacagaggggagagctgaagatctacttctggctaataaaagatcagagctctagtgatctgtgtgttggttttttgtgtctgcattctagctctagtgatcagcagttcaacctgttgatagtatgtactaagctctcatgtttaatgtactaagctctcatgtttaatgaactaaaccctcatggctaatgtactaagctctcatggctaatgtactaagctctcatgtttcatgtactaagctctcatgtttgaacaataaaattaatataaatcagcaacttaaatagcctctaaggttttaagttttataagaaaaaaaagaatatataaggcttttaaaggttttaaggtttcctaggttatcctcatatgagctcttagaaaaactcatccagcatcaaatgaaactgcaatttattcatatcaggattatcaataccatatttttgaaaaagtcttttctgtaatgaaggagaaaactcacccaggcagttccataggatggcaagatcctggtatctgtctgcaattccaactcttccaacatcaatacaacctattaatttcccctcatcaaaaataaggttatcaagtgagaaatcaccatgagtgaccactgaatctggtgagaatggcaaaagattatgcatttctttccagacttgttcaacaggccagccatttctctcatcatcaaaatcactggcatcaaccaaaccattattcattcttgattgggcctgagccagtctaaatactctatcagagttaaaaggacaattacaaacaggaatggaatgcaatcttctcaggaacactgccagggcatcaacaatattttcacctgaatcaggatattcttccaatacctggaatgctgttttccctgggatggcagtggtgagtaaccatgcatcatcaggagttctgataaaatgcttgatggttggaagaggcataaattcagtcagccagtttagtctgaccatctcatctgtaacatcattggcaacagaacctttgccatgtttcagaaacaactctggggcatctggcttcccatacaatctatagattgtggcacctgattgcccaacattatctctagcccatttatacccatataaatcagcatccatgttggaatttaatcttggcctggagcaagaggtttctctttgaatatggctcatacatgtgcacctcctatagtgagttgtattatactatgcagatatactatgccaatgtttaattgtcag

SEQ ID NO: 36 - DNA, 8634 bp, synthetic construct
  source 1..8634: mol_type = other DNA; note = Synthetic
cactatgtgttaattaaaattatctctaaggcatgtgaactggctgtcttggttttcatctgtacttcatctgctacctctgtgacctgaaacatatttataattccattaagctgtgcatatgatagatttatcatatgtattttccttaaaggatttttgtaagaactaattgaattgatacctgtaaagtctttatcacactacccaataaataataaatctctttgttcagctctctgtttctataaatatgtaccagttttattgtttttagtggtagtgattttattctctttctatatatatacacacacatgtgtgcattcataaatatatacaatttttatgaataaaaaattattagcaatcaatattgaaaaccactgatttttgtttatgtgagcaaacagcagattaaaaggaatttgaattctcatagctagcaggagtcaatgggaaaaacccattggagccaagtacactgactcaatagggactttccattgggttttgcccagtacataaggtcaatagggggtgagtcaacaggaaagtcccattggagccaagtacattgagtcaatagggactttccaatgggttttgcccagtacataaggtcaatgggaggtaagccaatgggtttttcccattactgacatgtatactgagtcattagggactttccaatgggttttgcccagtacataaggtcaataggggtgaatcaacaggaaagtcccattggagccaagtacactgagtcaatagggactttccattgggttttgcccagtacaaaaggtcaatagggggtgagtcaatgggtttttcccattattggcacatacataaggtcaataggggtgactagtggagaagagcatgcttgagggctgagtgcccctcagtgggcagagagcacatggcccacagtccctgagaagttggggggaggggtgggcaattgaactggtgcctagagaaggtggggcttgggtaaactgggaaagtgatgtggtgtactggctccacctttttccccagggtgggggagaaccatatataagtgcagtagtctctgtgaacattcaagcttctgccttctccctcctgtgagtttggtaagtcactgactgtctatgcctgggaaagggtgggcaggagatggggcagtgcaggaaaagtggcactatgaaccctgcagccctagacaattgtactaaccttcttctctttcctctcctgacaggttggtaaccaagccaccatgggatggtccctgatcctgctgtttctggtggctgtggccaccagagtgctgtctgaagtgcagctggtggaatctggccctggcctggttaagccctctgacatcctgagcctgacctgtgctgtgtctggctacagcatcagcagcaactactactggggctggatcagacagcctcctggcaaaggcctggaatggattggcagcatctaccactctggctccacctactacaagcccagcctggaaagcagactgggcatctctgtggacaccagcaagaaccagttcagcctgaagctgagctttgtgtctgctgctgacactgctgtgtactactgtgccagacatgttaggagtggctaccctgacacagcctactactttgataagtggggccagggcaccctggtcacagtgtctgcttctacaaagggcccctctgtgttcccactggctcctagcagcaagagcaccagtggtggaacagctgccctgggctgtctggtcaaggactactttcctgagccagtgacagtgtcctggaactctggggctctgacttctggggtgcacacattccctgctgtgctccagtcctctggcctgtacagcctgtcctctgtggtcactgtgccaagctctagcctgggcacccagacctacatctgcaatgtgaaccacaagcctagcaacaccaaggtggacaagaaggctgagcccaagagctgtgacaagacccacacctgtcctccatgtcctgctccagagctgcttggaggaccttctgtgtttctgttccctccaaagccaaaggacaccctgatgatcagcagaacccctgaagtgacctgtgtggtggtggatgtgtcccatgaggacccagaagtgaagttcaattggtatgtggatggtgttgaggtgcacaatgccaagaccaagcctagagaggaacagtacaacagcacctacagggttgtgtcagtgctgactgtgctgcaccaggactggctgaatggcaaagagtacaagtgcaaggtgtccaacaaggccctgcctgctcctattgaaaagaccatcagcaaggccaagggacagcctagggaaccccaggtgtacacactgccacctagcagagatgagctgaccaagaatcaggtgtccctgacatgccttgtgaagggcttctacccttctgacattgcagtggaatgggagagcaatggccagcctgagaacaactacaagacaacccctcctgtgctggactctgatggctcattcttcctgtactccaagctgacagtggacaagtccagatggcagcaaggcaatgtgttcagctgctctgtgatgcatgaggccctgcacaaccactacacacagaagtccctgtctctgagccctggcaagagaaagagaaggagtggatctggggccaccaacttcagcctgctgaaacaggctggggatgttgaagagaaccctggacctatggcctgggctctgctgcttctgggactgctgtctcactgcacaggcagtgtgaccagctatgtgctgacccagcctccatctgtgtctgtggctccaggggagacagccagaatcagctgtggtggcaacaacattggcacaaaggtgctgcactggtatcagcagactccaggacaggcaccagtgctggtggtgtatgatgactctgacagaccctctggcatcccagagaggttctctggcagcaactctggcaacacagccacactgaccatctccagagtggaagttggagatgaggctgattactactgccaagtgtgggacatcagcacagaccaggctgtgtttggtggtggcaccaagctcactgtgctgggccaacctaaagctgccccttctgtgacactgttcccacctagctctgaggaactccaggctaacaaggccacacttgtgtgcctgatcagtgacttctacccaggggctgtgactgtggcctggaaggctgatagcagccctgtgaaggctggggttgagacaaccacacctagcaagcagagcaacaacaaatatgctgccagcagctacctgagtctgacccctgagcagtggaagtcccacagatcctacagctgtcaagtgacccatgagggctccacagtggaaaagacagtggcccctacagagtgctcctgaagatctacttctggctaataaaagatcagagctctagtgatctgtgtgttggttttttgtgtctgcattctagcaggagtcaatgggaaaaacccattggagccaagtacactgactcaatagggactttccattgggttttgcccagtacataaggtcaatagggggtgagtcaacaggaaagtcccattggagccaagtacattgagtcaatagggactttccaatgggttttgcccagtacataaggtcaatgggaggtaagccaatgggtttttcccattactgacatgtatactgagtcattagggactttccaatgggttttgcccagtacataaggtcaataggggtgaatcaacaggaaagtcccattggagccaagtacactgagtcaatagggactttccattgggttttgcccagtacaaaaggtcaatagggggtgagtcaatgggtttttcccattattggcacatacataaggtcaataggggtgactagtggagaagagcatgcttgagggctgagtgcccctcagtgggcagagagcacatggcccacagtccctgagaagttggggggaggggtgggcaattgaactggtgcctagagaaggtggggcttgggtaaactgggaaagtgatgtggtgtactggctccacctttttccccagggtgggggagaaccatatataagtgcagtagtctctgtgaacattcaagcttctgccttctccctcctgtgagtttggtaagtcactgactgtctatgcctgggaaagggtgggcaggagatggggcagtgcaggaaaagtggcactatgaaccctgcagccctagacaattgtactaaccttcttctctttcctctcctgacaggttggtaaccaagccaccatgggatggtccctgatcctgctgtttctggtggctgtggccaccagagtgctgtctgaagtgcagctggtggaatctggccctggcctggttaagccctctgacatcctgagcctgacctgtgctgtgtctggctacagcatcagcagcaactactactggggctggatcagacagcctcctggcaaaggcctggaatggattggcagcatctaccactctggctccacctactacaagcccagcctggaaagcagactgggcatctctgtggacaccagcaagaaccagttcagcctgaagctgagctttgtgtctgctgctgacactgctgtgtactactgtgccagacatgttaggagtggctaccctgacacagcctactactttgataagtggggccagggcaccctggtcacagtgtctgcttctacaaagggcccctctgtgttcccactggctcctagcagcaagagcaccagtggtggaacagctgccctgggctgtctggtcaaggactactttcctgagccagtgacagtgtcctggaactctggggctctgacttctggggtgcacacattccctgctgtgctccagtcctctggcctgtacagcctgtcctctgtggtcactgtgccaagctctagcctgggcacccagacctacatctgcaatgtgaaccacaagcctagcaacaccaaggtggacaagaaggctgagcccaagagctgtgacaagacccacacctgtcctccatgtcctgctccagagctgcttggaggaccttctgtgtttctgttccctccaaagccaaaggacaccctgatgatcagcagaacccctgaagtgacctgtgtggtggtggatgtgtcccatgaggacccagaagtgaagttcaattggtatgtggatggtgttgaggtgcacaatgccaagaccaagcctagagaggaacagtacaacagcacctacagggttgtgtcagtgctgactgtgctgcaccaggactggctgaatggcaaagagtacaagtgcaaggtgtccaacaaggccctgcctgctcctattgaaaagaccatcagcaaggccaagggacagcctagggaaccccaggtgtacacactgccacctagcagagatgagctgaccaagaatcaggtgtccctgacatgccttgtgaagggcttctacccttctgacattgcagtggaatgggagagcaatggccagcctgagaacaactacaagacaacccctcctgtgctggactctgatggctcattcttcctgtactccaagctgacagtggacaagtccagatggcagcaaggcaatgtgttcagctgctctgtgatgcatgaggccctgcacaaccactacacacagaagtccctgtctctgagccctggcaagagaaagagaaggagtggatctggggccaccaacttcagcctgctgaaacaggctggggatgttgaagagaaccctggacctatggcctgggctctgctgcttctgggactgctgtctcactgcacaggcagtgtgaccagctatgtgctgacccagcctccatctgtgtctgtggctccaggggagacagccagaatcagctgtggtggcaacaacattggcacaaaggtgctgcactggtatcagcagactccaggacaggcaccagtgctggtggtgtatgatgactctgacagaccctctggcatcccagagaggttctctggcagcaactctggcaacacagccacactgaccatctccagagtggaagttggagatgaggctgattactactgccaagtgtgggacatcagcacagaccaggctgtgtttggtggtggcaccaagctcactgtgctgggccaacctaaagctgccccttctgtgacactgttcccacctagctctgaggaactccaggctaacaaggccacacttgtgtgcctgatcagtgacttctacccaggggctgtgactgtggcctggaaggctgatagcagccctgtgaaggctggggttgagacaaccacacctagcaagcagagcaacaacaaatatgctgccagcagctacctgagtctgacccctgagcagtggaagtcccacagatcctacagctgtcaagtgacccatgagggctccacagtggaaaagacagtggcccctacagagtgctcctgaagatctacttctggctaataaaagatcagagctctagtgatctgtgtgttggttttttgtgtctgcattctagcagtcaatatgttcaccccaaaaaagctgtttgttaacttgtcaacctcattctaaaatgtatatagaagcccaaaagacaataacaaaaatattcttgtagaacaaaatgggaaagaatgttccactaaatatcaagatttagagcaaagcatgagatgtgtggggatagacagtgaggctgataaaatagagtagagctcagaaacagacccattgatatatgtaagtgacctatgaaaaaaatatggcattttacaatgggaaaatgatggtctttttcttttttagaaaaacagggaaatatatttatatgtaaaaaataaaagggaacccatatgtcataccatacacacaaaaaaattccagtgaattataagtctaaatggagaaggcaaaactttaaatcttttagaaaataatatagaagcatgccatcaagacttcagtgtagagaaaaatttcttatgactcaaagtcctaaccacaaagaaaagattgttaattagattgcatgaatattaagacttatttttaaaattaaaaaaccattaagaaaagtcaggccatagaatgacagaaaatatttgcaacaccccagtaaagagaattgtaatatgcagattataaaaagaagtcttacaaatcagtaaaaaataaaactagacaaaaatttgaacagatgaaagagaaactctaaataatcattacacatgagaaactcaatctcagaaatcagagaactatcattgcatatacactaaattagagaaatattaaaaggctaagtaacatctgtggcttaattaatctagctctagtgatcagcagttcaacctgttgatagtatgtactaagctctcatgtttaatgtactaagctctcatgtttaatgaactaaaccctcatggctaatgtactaagctctcatggctaatgtactaagctctcatgtttcatgtactaagctctcatgtttgaacaataaaattaatataaatcagcaacttaaatagcctctaaggttttaagttttataagaaaaaaaagaatatataaggcttttaaaggttttaaggtttcctaggttatcctcatatgagctcttagaaaaactcatccagcatcaaatgaaactgcaatttattcatatcaggattatcaataccatatttttgaaaaagtcttttctgtaatgaaggagaaaactcacccaggcagttccataggatggcaagatcctggtatctgtctgcaattccaactcttccaacatcaatacaacctattaatttcccctcatcaaaaataaggttatcaagtgagaaatcaccatgagtgaccactgaatctggtgagaatggcaaaagattatgcatttctttccagacttgttcaacaggccagccatttctctcatcatcaaaatcactggcatcaaccaaaccattattcattcttgattgggcctgagccagtctaaatactctatcagagttaaaaggacaattacaaacaggaatggaatgcaatcttctcaggaacactgccagggcatcaacaatattttcacctgaatcaggatattcttccaatacctggaatgctgttttccctgggatggcagtggtgagtaaccatgcatcatcaggagttctgataaaatgcttgatggttggaagaggcataaattcagtcagccagtttagtctgaccatctcatctgtaacatcattggcaacagaacctttgccatgtttcagaaacaactctggggcatctggcttcccatacaatctatagattgtggcacctgattgcccaacattatctctagcccatttatacccatataaatcagcatccatgttggaatttaatcttggcctggagcaagaggtttctctttgaatatggctcatacatgtgcacctcctatagtgagttgtattatactatgcagatatactatgccaatgtttaattgtcag

SEQ ID NO: 37 - DNA, 8658 bp, synthetic construct
  source 1..8658: mol_type = other DNA; note = Synthetic
cactatgtgttaattaaaattatctctaaggcatgtgaactggctgtcttggttttcatctgtacttcatctgctacctctgtgacctgaaacatatttataattccattaagctgtgcatatgatagatttatcatatgtattttccttaaaggatttttgtaagaactaattgaattgatacctgtaaagtctttatcacactacccaataaataataaatctctttgttcagctctctgtttctataaatatgtaccagttttattgtttttagtggtagtgattttattctctttctatatatatacacacacatgtgtgcattcataaatatatacaatttttatgaataaaaaattattagcaatcaatattgaaaaccactgatttttgtttatgtgagcaaacagcagattaaaaggaatttgaattctcatagctagcaggagtcaatgggaaaaacccattggagccaagtacactgactcaatagggactttccattgggttttgcccagtacataaggtcaatagggggtgagtcaacaggaaagtcccattggagccaagtacattgagtcaatagggactttccaatgggttttgcccagtacataaggtcaatgggaggtaagccaatgggtttttcccattactgacatgtatactgagtcattagggactttccaatgggttttgcccagtacataaggtcaataggggtgaatcaacaggaaagtcccattggagccaagtacactgagtcaatagggactttccattgggttttgcccagtacaaaaggtcaatagggggtgagtcaatgggtttttcccattattggcacatacataaggtcaataggggtgactagtggagaagagcatgcttgagggctgagtgcccctcagtgggcagagagcacatggcccacagtccctgagaagttggggggaggggtgggcaattgaactggtgcctagagaaggtggggcttgggtaaactgggaaagtgatgtggtgtactggctccacctttttccccagggtgggggagaaccatatataagtgcagtagtctctgtgaacattcaagcttctgccttctccctcctgtgagtttggtaagtcactgactgtctatgcctgggaaagggtgggcaggagatggggcagtgcaggaaaagtggcactatgaaccctgcagccctagacaattgtactaaccttcttctctttcctctcctgacaggttggtaaccaagccaccatggtcctccagacacaggtgttcatcagcctgctgctgtggatcagtggtgcctatggacaggtccagctgcaagagtctggccctggacttgtcagacccagccagacactgagcctgacctgtacagtctctggcttcagcctgaccagctactctgtgcactgggtcagacagcctccaggcagaggactggaatggctgggagtgatctgggccagtggtggcacagactacaactctgccctgatgagcagactgagcatcctgaaggacaacagcaagaaccaggtgtccctgagactgtcctctgtgacagctgctgatacagctgtgtacttctgtgccagagatcctcctagctctctgctgagactggactactggggccagggcacaacagtgacagtgtccagtgccagcacaaagggcccctctgtgtttcctctggctcccagcagcaagagcaccagtggtggaactgctgccctgggctgtctggtcaaggactactttcctgagcctgtgactgtgtcctggaactctggggctctgacatctggggtgcacacattccctgctgtgctgcaatcctctggcctgtacagcctcagctctgtggtcacagtgcctagctctagcctgggcacccagacctacatctgcaatgtgaaccacaagcctagcaacaccaaggtggacaagaaggctgagcccaagagctgtgacaagacccacacctgtcctccatgtcctgctccagagctgcttggaggacccagtgtgttcctgtttcctccaaagccaaaggacaccctgatgatcagcagaacccctgaagtgacctgtgtggtggtggatgtgtcccatgaggaccctgaagtcaagttcaattggtatgtggatggtgttgaggtgcacaatgccaagaccaagcctagagaggaacagtacaacagcacctacagagtggtgtcagtgctgacagtgctgcaccaggactggctgaatggcaaagagtacaagtgcaaggtgtccaacaaggccctgcctgctcctattgaaaagaccatcagcaaggccaagggccagcctagggaaccccaggtttacacactgccacctagcagagatgagctgaccaaaaatcaggtttccctgacctgcctggttaagggcttctacccctctgacattgctgtggaatgggagagcaatggccagcctgagaacaactacaagacaacccctcctgtgctggactctgatggctcattcttcctgtactccaagctgactgtggacaaaagcagatggcagcaaggcaatgtgttcagctgctctgtgatgcatgaggccctgcacaaccactacacccagaagtccctgtctctgagccctggcaagagaaagagaaggagtggctctggggccaccaactttagcctgctgaaacaggctggggatgttgaagagaaccctggacctatggtgctgcaaacccaggttttcatttctctgctcctctggattagtggtgcttatggggacattgtgatgacacagagccctagcagcctgtctgcctctgtgggagacagagtgaccatcacatgcaagtccagccagagtctgctgaactctggcaaccagaagaactacctggcctggtatcagcaaaagcctggcaaggcccctaagctgctcatctatggggccagcaccagagagtctggggtcccagatagattctctggctctggatctggcactgacttcaccttcaccatcagctccctgcaaccagaggacattgccacctactactgccagaatgtgcacagcttcccattcacctttggacagggcactaaggtggaaatcaagaggactgtggctgctccttctgtgttcatcttcccaccatcagatgaacagctgaagagtggcacagcctctgttgtgtgcctgctcaacaacttctaccctagagaagccaaggtgcagtggaaagtggacaatgccctccagtctggcaacagccaagaatctgtgactgagcaggactccaaggacagcacatacagcctgagcagcacactgaccctgagcaaggctgactatgagaagcacaaagtctatgcctgtgaagtgacacaccagggcctgtctagcccagtgaccaagtccttcaacaggggagagagctgaagatctacttctggctaataaaagatcagagctctagtgatctgtgtgttggttttttgtgtctgcattctagcaggagtcaatgggaaaaacccattggagccaagtacactgactcaatagggactttccattgggttttgcccagtacataaggtcaatagggggtgagtcaacaggaaagtcccattggagccaagtacattgagtcaatagggactttccaatgggttttgcccagtacataaggtcaatgggaggtaagccaatgggtttttcccattactgacatgtatactgagtcattagggactttccaatgggttttgcccagtacataaggtcaataggggtgaatcaacaggaaagtcccattggagccaagtacactgagtcaatagggactttccattgggttttgcccagtacaaaaggtcaatagggggtgagtcaatgggtttttcccattattggcacatacataaggtcaataggggtgactagtggagaagagcatgcttgagggctgagtgcccctcagtgggcagagagcacatggcccacagtccctgagaagttggggggaggggtgggcaattgaactggtgcctagagaaggtggggcttgggtaaactgggaaagtgatgtggtgtactggctccacctttttccccagggtgggggagaaccatatataagtgcagtagtctctgtgaacattcaagcttctgccttctccctcctgtgagtttggtaagtcactgactgtctatgcctgggaaagggtgggcaggagatggggcagtgcaggaaaagtggcactatgaaccctgcagccctagacaattgtactaaccttcttctctttcctctcctgacaggttggtaaccaagccaccatggtcctccagacacaggtgttcatcagcctgctgctgtggatcagtggtgcctatggacaggtccagctgcaagagtctggccctggacttgtcagacccagccagacactgagcctgacctgtacagtctctggcttcagcctgaccagctactctgtgcactgggtcagacagcctccaggcagaggactggaatggctgggagtgatctgggccagtggtggcacagactacaactctgccctgatgagcagactgagcatcctgaaggacaacagcaagaaccaggtgtccctgagactgtcctctgtgacagctgctgatacagctgtgtacttctgtgccagagatcctcctagctctctgctgagactggactactggggccagggcacaacagtgacagtgtccagtgccagcacaaagggcccctctgtgtttcctctggctcccagcagcaagagcaccagtggtggaactgctgccctgggctgtctggtcaaggactactttcctgagcctgtgactgtgtcctggaactctggggctctgacatctggggtgcacacattccctgctgtgctgcaatcctctggcctgtacagcctcagctctgtggtcacagtgcctagctctagcctgggcacccagacctacatctgcaatgtgaaccacaagcctagcaacaccaaggtggacaagaaggctgagcccaagagctgtgacaagacccacacctgtcctccatgtcctgctccagagctgcttggaggacccagtgtgttcctgtttcctccaaagccaaaggacaccctgatgatcagcagaacccctgaagtgacctgtgtggtggtggatgtgtcccatgaggaccctgaagtcaagttcaattggtatgtggatggtgttgaggtgcacaatgccaagaccaagcctagagaggaacagtacaacagcacctacagagtggtgtcagtgctgacagtgctgcaccaggactggctgaatggcaaagagtacaagtgcaaggtgtccaacaaggccctgcctgctcctattgaaaagaccatcagcaaggccaagggccagcctagggaaccccaggtttacacactgccacctagcagagatgagctgaccaaaaatcaggtttccctgacctgcctggttaagggcttctacccctctgacattgctgtggaatgggagagcaatggccagcctgagaacaactacaagacaacccctcctgtgctggactctgatggctcattcttcctgtactccaagctgactgtggacaaaagcagatggcagcaaggcaatgtgttcagctgctctgtgatgcatgaggccctgcacaaccactacacccagaagtccctgtctctgagccctggcaagagaaagagaaggagtggctctggggccaccaactttagcctgctgaaacaggctggggatgttgaagagaaccctggacctatggtgctgcaaacccaggttttcatttctctgctcctctggattagtggtgcttatggggacattgtgatgacacagagccctagcagcctgtctgcctctgtgggagacagagtgaccatcacatgcaagtccagccagagtctgctgaactctggcaaccagaagaactacctggcctggtatcagcaaaagcctggcaaggcccctaagctgctcatctatggggccagcaccagagagtctggggtcccagatagattctctggctctggatctggcactgacttcaccttcaccatcagctccctgcaaccagaggacattgccacctactactgccagaatgtgcacagcttcccattcacctttggacagggcactaaggtggaaatcaagaggactgtggctgctccttctgtgttcatcttcccaccatcagatgaacagctgaagagtggcacagcctctgttgtgtgcctgctcaacaacttctaccctagagaagccaaggtgcagtggaaagtggacaatgccctccagtctggcaacagccaagaatctgtgactgagcaggactccaaggacagcacatacagcctgagcagcacactgaccctgagcaaggctgactatgagaagcacaaagtctatgcctgtgaagtgacacaccagggcctgtctagcccagtgaccaagtccttcaacaggggagagagctgaagatctacttctggctaataaaagatcagagctctagtgatctgtgtgttggttttttgtgtctgcattctagcagtcaatatgttcaccccaaaaaagctgtttgttaacttgtcaacctcattctaaaatgtatatagaagcccaaaagacaataacaaaaatattcttgtagaacaaaatgggaaagaatgttccactaaatatcaagatttagagcaaagcatgagatgtgtggggatagacagtgaggctgataaaatagagtagagctcagaaacagacccattgatatatgtaagtgacctatgaaaaaaatatggcattttacaatgggaaaatgatggtctttttcttttttagaaaaacagggaaatatatttatatgtaaaaaataaaagggaacccatatgtcataccatacacacaaaaaaattccagtgaattataagtctaaatggagaaggcaaaactttaaatcttttagaaaataatatagaagcatgccatcaagacttcagtgtagagaaaaatttcttatgactcaaagtcctaaccacaaagaaaagattgttaattagattgcatgaatattaagacttatttttaaaattaaaaaaccattaagaaaagtcaggccatagaatgacagaaaatatttgcaacaccccagtaaagagaattgtaatatgcagattataaaaagaagtcttacaaatcagtaaaaaataaaactagacaaaaatttgaacagatgaaagagaaactctaaataatcattacacatgagaaactcaatctcagaaatcagagaactatcattgcatatacactaaattagagaaatattaaaaggctaagtaacatctgtggcttaattaatctagctctagtgatcagcagttcaacctgttgatagtatgtactaagctctcatgtttaatgtactaagctctcatgtttaatgaactaaaccctcatggctaatgtactaagctctcatggctaatgtactaagctctcatgtttcatgtactaagctctcatgtttgaacaataaaattaatataaatcagcaacttaaatagcctctaaggttttaagttttataagaaaaaaaagaatatataaggcttttaaaggttttaaggtttcctaggttatcctcatatgagctcttagaaaaactcatccagcatcaaatgaaactgcaatttattcatatcaggattatcaataccatatttttgaaaaagtcttttctgtaatgaaggagaaaactcacccaggcagttccataggatggcaagatcctggtatctgtctgcaattccaactcttccaacatcaatacaacctattaatttcccctcatcaaaaataaggttatcaagtgagaaatcaccatgagtgaccactgaatctggtgagaatggcaaaagattatgcatttctttccagacttgttcaacaggccagccatttctctcatcatcaaaatcactggcatcaaccaaaccattattcattcttgattgggcctgagccagtctaaatactctatcagagttaaaaggacaattacaaacaggaatggaatgcaatcttctcaggaacactgccagggcatcaacaatattttcacctgaatcaggatattcttccaatacctggaatgctgttttccctgggatggcagtggtgagtaaccatgcatcatcaggagttctgataaaatgcttgatggttggaagaggcataaattcagtcagccagtttagtctgaccatctcatctgtaacatcattggcaacagaacctttgccatgtttcagaaacaactctggggcatctggcttcccatacaatctatagattgtggcacctgattgcccaacattatctctagcccatttatacccatataaatcagcatccatgttggaatttaatcttggcctggagcaagaggtttctctttgaatatggctcatacatgtgcacctcctatagtgagttgtattatactatgcagatatactatgccaatgtttaattgtcag

SEQ ID NO: 38 - DNA, 8646 bp, synthetic construct
  source 1..8646: mol_type = other DNA; note = Synthetic
cactatgtgttaattaaaattatctctaaggcatgtgaactggctgtcttggttttcatctgtacttcatctgctacctctgtgacctgaaacatatttataattccattaagctgtgcatatgatagatttatcatatgtattttccttaaaggatttttgtaagaactaattgaattgatacctgtaaagtctttatcacactacccaataaataataaatctctttgttcagctctctgtttctataaatatgtaccagttttattgtttttagtggtagtgattttattctctttctatatatatacacacacatgtgtgcattcataaatatatacaatttttatgaataaaaaattattagcaatcaatattgaaaaccactgatttttgtttatgtgagcaaacagcagattaaaaggaatttgaattctcatagctagcaggagtcaatgggaaaaacccattggagccaagtacactgactcaatagggactttccattgggttttgcccagtacataaggtcaatagggggtgagtcaacaggaaagtcccattggagccaagtacattgagtcaatagggactttccaatgggttttgcccagtacataaggtcaatgggaggtaagccaatgggtttttcccattactgacatgtatactgagtcattagggactttccaatgggttttgcccagtacataaggtcaataggggtgaatcaacaggaaagtcccattggagccaagtacactgagtcaatagggactttccattgggttttgcccagtacaaaaggtcaatagggggtgagtcaatgggtttttcccattattggcacatacataaggtcaataggggtgactagtggagaagagcatgcttgagggctgagtgcccctcagtgggcagagagcacatggcccacagtccctgagaagttggggggaggggtgggcaattgaactggtgcctagagaaggtggggcttgggtaaactgggaaagtgatgtggtgtactggctccacctttttccccagggtgggggagaaccatatataagtgcagtagtctctgtgaacattcaagcttctgccttctccctcctgtgagtttggtaagtcactgactgtctatgcctgggaaagggtgggcaggagatggggcagtgcaggaaaagtggcactatgaaccctgcagccctagacaattgtactaaccttcttctctttcctctcctgacaggttggtaaccaagccaccatgggatggtccctgatcctgctgtttctggtggctgtggccaccagagtgctgtctgaagtgcagctggtggaatctggccctggcctggttaagccctctgacatcctgagcctgacctgtgctgtgtctggctacagcatcagcagcaactactactggggctggatcagacagcctcctggcaaaggcctggaatggattggcagcatctaccactctggctccacctactacaagcccagcctggaaagcagactgggcatctctgtggacaccagcaagaaccagttcagcctgaagctgagctttgtgtctgctgctgacactgctgtgtactactgtgccagacatgttaggagtggctaccctgacacagcctactactttgataagtggggccagggcaccctggtcacagtgtctgcttctacaaagggcccctctgtgttcccactggctcctagcagcaagagcaccagtggtggaacagctgccctgggctgtctggtcaaggactactttcctgagccagtgacagtgtcctggaactctggggctctgacttctggggtgcacacattccctgctgtgctccagtcctctggcctgtacagcctgtcctctgtggtcactgtgccaagctctagcctgggcacccagacctacatctgcaatgtgaaccacaagcctagcaacaccaaggtggacaagaaggctgagcccaagagctgtgacaagacccacacctgtcctccatgtcctgctccagagctgcttggaggaccttctgtgtttctgttccctccaaagccaaaggacaccctgatgatcagcagaacccctgaagtgacctgtgtggtggtggatgtgtcccatgaggacccagaagtgaagttcaattggtatgtggatggtgttgaggtgcacaatgccaagaccaagcctagagaggaacagtacaacagcacctacagggttgtgtcagtgctgactgtgctgcaccaggactggctgaatggcaaagagtacaagtgcaaggtgtccaacaaggccctgcctgctcctattgaaaagaccatcagcaaggccaagggacagcctagggaaccccaggtgtacacactgccacctagcagagatgagctgaccaagaatcaggtgtccctgacatgccttgtgaagggcttctacccttctgacattgcagtggaatgggagagcaatggccagcctgagaacaactacaagacaacccctcctgtgctggactctgatggctcattcttcctgtactccaagctgacagtggacaagtccagatggcagcaaggcaatgtgttcagctgctctgtgatgcatgaggccctgcacaaccactacacacagaagtccctgtctctgagccctggcaagagaaagagaaggagtggatctggggccaccaacttcagcctgctgaaacaggctggggatgttgaagagaaccctggacctatggcctgggctctgctgcttctgggactgctgtctcactgcacaggcagtgtgaccagctatgtgctgacccagcctccatctgtgtctgtggctccaggggagacagccagaatcagctgtggtggcaacaacattggcacaaaggtgctgcactggtatcagcagactccaggacaggcaccagtgctggtggtgtatgatgactctgacagaccctctggcatcccagagaggttctctggcagcaactctggcaacacagccacactgaccatctccagagtggaagttggagatgaggctgattactactgccaagtgtgggacatcagcacagaccaggctgtgtttggtggtggcaccaagctcactgtgctgggccaacctaaagctgccccttctgtgacactgttcccacctagctctgaggaactccaggctaacaaggccacacttgtgtgcctgatcagtgacttctacccaggggctgtgactgtggcctggaaggctgatagcagccctgtgaaggctggggttgagacaaccacacctagcaagcagagcaacaacaaatatgctgccagcagctacctgagtctgacccctgagcagtggaagtcccacagatcctacagctgtcaagtgacccatgagggctccacagtggaaaagacagtggcccctacagagtgctcctgaagatctacttctggctaataaaagatcagagctctagtgatctgtgtgttggttttttgtgtctgcattctagcaggagtcaatgggaaaaacccattggagccaagtacactgactcaatagggactttccattgggttttgcccagtacataaggtcaatagggggtgagtcaacaggaaagtcccattggagccaagtacattgagtcaatagggactttccaatgggttttgcccagtacataaggtcaatgggaggtaagccaatgggtttttcccattactgacatgtatactgagtcattagggactttccaatgggttttgcccagtacataaggtcaataggggtgaatcaacaggaaagtcccattggagccaagtacactgagtcaatagggactttccattgggttttgcccagtacaaaaggtcaatagggggtgagtcaatgggtttttcccattattggcacatacataaggtcaataggggtgactagtggagaagagcatgcttgagggctgagtgcccctcagtgggcagagagcacatggcccacagtccctgagaagttggggggaggggtgggcaattgaactggtgcctagagaaggtggggcttgggtaaactgggaaagtgatgtggtgtactggctccacctttttccccagggtgggggagaaccatatataagtgcagtagtctctgtgaacattcaagcttctgccttctccctcctgtgagtttggtaagtcactgactgtctatgcctgggaaagggtgggcaggagatggggcagtgcaggaaaagtggcactatgaaccctgcagccctagacaattgtactaaccttcttctctttcctctcctgacaggttggtaaccaagccaccatggtcctccagacacaggtgttcatcagcctgctgctgtggatcagtggtgcctatggacaggtccagctgcaagagtctggccctggacttgtcagacccagccagacactgagcctgacctgtacagtctctggcttcagcctgaccagctactctgtgcactgggtcagacagcctccaggcagaggactggaatggctgggagtgatctgggccagtggtggcacagactacaactctgccctgatgagcagactgagcatcctgaaggacaacagcaagaaccaggtgtccctgagactgtcctctgtgacagctgctgatacagctgtgtacttctgtgccagagatcctcctagctctctgctgagactggactactggggccagggcacaacagtgacagtgtccagtgccagcacaaagggcccctctgtgtttcctctggctcccagcagcaagagcaccagtggtggaactgctgccctgggctgtctggtcaaggactactttcctgagcctgtgactgtgtcctggaactctggggctctgacatctggggtgcacacattccctgctgtgctgcaatcctctggcctgtacagcctcagctctgtggtcacagtgcctagctctagcctgggcacccagacctacatctgcaatgtgaaccacaagcctagcaacaccaaggtggacaagaaggctgagcccaagagctgtgacaagacccacacctgtcctccatgtcctgctccagagctgcttggaggacccagtgtgttcctgtttcctccaaagccaaaggacaccctgatgatcagcagaacccctgaagtgacctgtgtggtggtggatgtgtcccatgaggaccctgaagtcaagttcaattggtatgtggatggtgttgaggtgcacaatgccaagaccaagcctagagaggaacagtacaacagcacctacagagtggtgtcagtgctgacagtgctgcaccaggactggctgaatggcaaagagtacaagtgcaaggtgtccaacaaggccctgcctgctcctattgaaaagaccatcagcaaggccaagggccagcctagggaaccccaggtttacacactgccacctagcagagatgagctgaccaaaaatcaggtttccctgacctgcctggttaagggcttctacccctctgacattgctgtggaatgggagagcaatggccagcctgagaacaactacaagacaacccctcctgtgctggactctgatggctcattcttcctgtactccaagctgactgtggacaaaagcagatggcagcaaggcaatgtgttcagctgctctgtgatgcatgaggccctgcacaaccactacacccagaagtccctgtctctgagccctggcaagagaaagagaaggagtggctctggggccaccaactttagcctgctgaaacaggctggggatgttgaagagaaccctggacctatggtgctgcaaacccaggttttcatttctctgctcctctggattagtggtgcttatggggacattgtgatgacacagagccctagcagcctgtctgcctctgtgggagacagagtgaccatcacatgcaagtccagccagagtctgctgaactctggcaaccagaagaactacctggcctggtatcagcaaaagcctggcaaggcccctaagctgctcatctatggggccagcaccagagagtctggggtcccagatagattctctggctctggatctggcactgacttcaccttcaccatcagctccctgcaaccagaggacattgccacctactactgccagaatgtgcacagcttcccattcacctttggacagggcactaaggtggaaatcaagaggactgtggctgctccttctgtgttcatcttcccaccatcagatgaacagctgaagagtggcacagcctctgttgtgtgcctgctcaacaacttctaccctagagaagccaaggtgcagtggaaagtggacaatgccctccagtctggcaacagccaagaatctgtgactgagcaggactccaaggacagcacatacagcctgagcagcacactgaccctgagcaaggctgactatgagaagcacaaagtctatgcctgtgaagtgacacaccagggcctgtctagcccagtgaccaagtccttcaacaggggagagagctgaagatctacttctggctaataaaagatcagagctctagtgatctgtgtgttggttttttgtgtctgcattctagcagtcaatatgttcaccccaaaaaagctgtttgttaacttgtcaacctcattctaaaatgtatatagaagcccaaaagacaataacaaaaatattcttgtagaacaaaatgggaaagaatgttccactaaatatcaagatttagagcaaagcatgagatgtgtggggatagacagtgaggctgataaaatagagtagagctcagaaacagacccattgatatatgtaagtgacctatgaaaaaaatatggcattttacaatgggaaaatgatggtctttttcttttttagaaaaacagggaaatatatttatatgtaaaaaataaaagggaacccatatgtcataccatacacacaaaaaaattccagtgaattataagtctaaatggagaaggcaaaactttaaatcttttagaaaataatatagaagcatgccatcaagacttcagtgtagagaaaaatttcttatgactcaaagtcctaaccacaaagaaaagattgttaattagattgcatgaatattaagacttatttttaaaattaaaaaaccattaagaaaagtcaggccatagaatgacagaaaatatttgcaacaccccagtaaagagaattgtaatatgcagattataaaaagaagtcttacaaatcagtaaaaaataaaactagacaaaaatttgaacagatgaaagagaaactctaaataatcattacacatgagaaactcaatctcagaaatcagagaactatcattgcatatacactaaattagagaaatattaaaaggctaagtaacatctgtggcttaattaatctagctctagtgatcagcagttcaacctgttgatagtatgtactaagctctcatgtttaatgtactaagctctcatgtttaatgaactaaaccctcatggctaatgtactaagctctcatggctaatgtactaagctctcatgtttcatgtactaagctctcatgtttgaacaataaaattaatataaatcagcaacttaaatagcctctaaggttttaagttttataagaaaaaaaagaatatataaggcttttaaaggttttaaggtttcctaggttatcctcatatgagctcttagaaaaactcatccagcatcaaatgaaactgcaatttattcatatcaggattatcaataccatatttttgaaaaagtcttttctgtaatgaaggagaaaactcacccaggcagttccataggatggcaagatcctggtatctgtctgcaattccaactcttccaacatcaatacaacctattaatttcccctcatcaaaaataaggttatcaagtgagaaatcaccatgagtgaccactgaatctggtgagaatggcaaaagattatgcatttctttccagacttgttcaacaggccagccatttctctcatcatcaaaatcactggcatcaaccaaaccattattcattcttgattgggcctgagccagtctaaatactctatcagagttaaaaggacaattacaaacaggaatggaatgcaatcttctcaggaacactgccagggcatcaacaatattttcacctgaatcaggatattcttccaatacctggaatgctgttttccctgggatggcagtggtgagtaaccatgcatcatcaggagttctgataaaatgcttgatggttggaagaggcataaattcagtcagccagtttagtctgaccatctcatctgtaacatcattggcaacagaacctttgccatgtttcagaaacaactctggggcatctggcttcccatacaatctatagattgtggcacctgattgcccaacattatctctagcccatttatacccatataaatcagcatccatgttggaatttaatcttggcctggagcaagaggtttctctttgaatatggctcatacatgtgcacctcctatagtgagttgtattatactatgcagatatactatgccaatgtttaattgtcag

SEQ ID NO: 39 - DNA, 654 bp, synthetic construct
  source 1..654: mol_type = other DNA; note = Synthetic
atggctacaggcagcagaacctctctgctgctggcttttggcctgctgtgtctgccttggctgcaagagggctctgctttccctacaatccctctgagcaggctgtttgacaatgccatgctgagagcccacagactgcaccagctggcctttgacacctaccaagagtttgaagaggcttacatccccaaagagcagaagtacagcttcctccagaatcctcagaccagcctgtgcttctctgagagcatccccacacctagcaacagagaggaaacccagcagaagtccaacctggaactgctgagaatcagcctgctgctgatccagagctggctggaacctgtgcagttcctgagatcagtgtttgccaacagcctggtgtatggggcctctgacagcaatgtgtatgacctgctgaaggacctggaagagggcatccagacactgatgggcagactggaagatggcagccccagaacaggccagattttcaagcagacctacagcaagtttgacaccaacagccacaatgatgatgccctgctcaagaactatgggctgctgtactgcttcagaaaggacatggacaaggtggaaaccttcctgaggattgtgcagtgcagaagtgtggaaggcagctgtggcttctga

SEQ ID NO: 40 - DNA, 1350 bp, synthetic construct
  source 1..1350: mol_type = other DNA; note = Synthetic
atggctacaggcagcagaacctctctgctgctggcttttggcctgctgtgtctgccttggctgcaagagggctctgctttccctacaatccctctgagcaggctgtttgacaatgccatgctgagagcccacagactgcaccagctggcctttgacacctaccaagagtttgaagaggcttacatccccaaagagcagaagtacagcttcctccagaatcctcagaccagcctgtgcttctctgagagcatccccacacctagcaacagagaggaaacccagcagaagtccaacctggaactgctgagaatcagcctgctgctgatccagagctggctggaacctgtgcagttcctgagatcagtgtttgccaacagcctggtgtatggggcctctgacagcaatgtgtatgacctgctgaaggacctggaagagggcatccagacactgatgggcagactggaagatggcagccccagaacaggccagattttcaagcagacctacagcaagtttgacaccaacagccacaatgatgatgccctgctcaagaactatgggctgctgtactgcttcagaaaggacatggacaaggtggaaaccttcctgaggattgtgcagtgcagaagtgtggaaggcagctgtggctttgagcccaagagctgtgacaagacccacacctgtcctccatgtcctgctccagagctgcttggaggaccttctgtgtttctgttccctccaaagccaaaggacaccctgatgatcagcagaacccctgaagtgacctgtgtggtggtggatgtgtcccatgaggacccagaagtgaagttcaattggtatgtggatggtgttgaggtgcacaatgccaagaccaagcctagagaggaacagtacaacagcacctacagggttgtgtcagtgctgactgtgctgcaccaggactggctgaatggcaaagagtacaagtgcaaggtgtccaacaaggccctgcctgctcctattgaaaagaccatcagcaaggccaagggacagcctagggaaccccaggtgtacacactgccacctagcagagatgagctgaccaagaatcaggtgtccctgacatgccttgtgaagggcttctacccttctgacattgcagtggaatgggagagcaatggccagcctgagaacaactacaagacaacccctcctgtgctggactctgatggctcattcttcctgtactccaagctgacagtggacaagtccagatggcagcaaggcaatgtgttcagctgctctgtgatgcatgaggccctgcacaaccactacacacagaagtccctgtctctgagccctggcaagtga

SEQ ID NO: 41 - skipped

SEQ ID NO: 42 - DNA, 15 bp, synthetic construct
  source 1..15: mol_type = other DNA; note = Synthetic
ggtggaggaggtagt

SEQ ID NO: 43 - DNA, 30 bp, synthetic construct
  source 1..30: mol_type = other DNA; note = Synthetic
ggtggaggaggtagtgggggtggaggttca

SEQ ID NO: 44 - DNA, 45 bp, synthetic construct
  source 1..45: mol_type = other DNA; note = Synthetic
ggaggaggtggatcaggtggaggaggtagtgggggtggaggttca

SEQ ID NO: 45 - DNA, 699 bp, synthetic construct
  source 1..699: mol_type = other DNA; note = Synthetic
gagcccaagagctgtgacaagacccacacctgtcctccatgtcctgctccagagctgcttggaggaccttctgtgtttctgttccctccaaagccaaaggacaccctgatgatcagcagaacccctgaagtgacctgtgtggtggtggatgtgtcccatgaggacccagaagtgaagttcaattggtatgtggatggtgttgaggtgcacaatgccaagaccaagcctagagaggaacagtacaacagcacctacagggttgtgtcagtgctgactgtgctgcaccaggactggctgaatggcaaagagtacaagtgcaaggtgtccaacaaggccctgcctgctcctattgaaaagaccatcagcaaggccaagggacagcctagggaaccccaggtgtacacactgccacctagcagagatgagctgaccaagaatcaggtgtccctgacatgccttgtgaagggcttctacccttctgacattgcagtggaatgggagagcaatggccagcctgagaacaactacaagacaacccctcctgtgctggactctgatggctcattcttcctgtactccaagctgacagtggacaagtccagatggcagcaaggcaatgtgttcagctgctctgtgatgcatgaggccctgcacaaccactacacacagaagtccctgtctctgagccctggcaagtga

SEQ ID NO: 46 - DNA, 699 bp, synthetic construct
  source 1..699: mol_type = other DNA; note = Synthetic
gagcccaagagctgtgacaagacccacacctgtcctccatgtcctgctccagagctgcttggaggaccttctgtgtttctgttccctccaaagccaaaggacaccctgatgatcagcagaacccctgaagtgacctgtgtggtggtggatgtgtcccatgaggacccagaagtgaagttcaattggtatgtggatggtgttgaggtgcacaatgccaagaccaagcctagagaggaacagtacaacagcacctacagggttgtgtcagtgctgactgtgctgcaccaggactggctgaatggcaaagagtacaagtgcaaggtgtccaacaaggccctgcctgctcctattgaaaagaccatcagcaaggccaagggacagcctagggaaccccaggtgtacacactgccaccttgcagagatgagctgaccaagaatcaggtgtccctgtggtgccttgtgaagggcttctacccttctgacattgcagtggaatgggagagcaatggccagcctgagaacaactacaagacaacccctcctgtgctggactctgatggctcattcttcctgtactccaagctgacagtggacaagtccagatggcagcaaggcaatgtgttcagctgctctgtgatgcatgaggccctgcacaaccactacacacagaagtccctgtctctgagccctggcaagtga

SEQ ID NO: 47 - DNA, 699 bp, synthetic construct
  source 1..699: mol_type = other DNA; note = Synthetic
gagcccaagagctgtgacaagacccacacctgtcctccatgtcctgctccagagctgcttggaggaccttctgtgtttctgttccctccaaagccaaaggacaccctgatgatcagcagaacccctgaagtgacctgtgtggtggtggatgtgtcccatgaggacccagaagtgaagttcaattggtatgtggatggtgttgaggtgcacaatgccaagaccaagcctagagaggaacagtacaacagcacctacagggttgtgtcagtgctgactgtgctgcaccaggactggctgaatggcaaagagtacaagtgcaaggtgtccaacaaggccctgcctgctcctattgaaaagaccatcagcaaggccaagggacagcctagggaaccccaggtgtgcacactgccacctagcagagatgagctgaccaagaatcaggtgtccctgtcatgtgctgtgaagggcttctacccttctgacattgcagtggaatgggagagcaatggccagcctgagaacaactacaagacaacccctcctgtgctggactctgatggctcattcttcctggtctccaagctgacagtggacaagtccagatggcagcaaggcaatgtgttcagctgctctgtgatgcatgaggccctgcacaaccactacacacagaagtccctgtctctgagccctggcaagtga

SEQ ID NO: 48 - DNA, 699 bp, synthetic construct
  source 1..699: mol_type = other DNA; note = Synthetic
gagcccaagagctgtgacaagacccacacctgtcctccatgtcctgctccagagctgcttggaggaccttctgtgtttctgttccctccaaagccaaaggacaccctgatgatcagcagaacccctgaagtgacctgtgtggtggtggatgtgtcccatgaggacccagaagtgaagttcaattggtatgtggatggtgttgaggtgcacaatgccaagaccaagcctagagaggaacagtacaacagcacctacagggttgtgtcagtgctgactgtgctgcaccaggactggctgaatggcaaagagtacaagtgcaaggtgtccaacaaggccctgcctgctcctattgaaaagaccatcagcaaggccaagggacagcctagggaaccccaggtgtgcacactgccaccttgcagagatgagctgaccaagaatcaggtgtccctgtcatgtgctgtgaagggcttctacccttctgacattgcagtggaatgggagagcaatggccagcctgagaacaactacaagacaacccctcctgtgctggactctgatggctcattcttcctggtctccaagctgacagtggacaagtccagatggcagcaaggcaatgtgttcagctgctctgtgatgcatgaggccctgcacaaccactacacacagaagtccctgtctctgagccctggcaagtga

SEQ ID NO: 49 - DNA, 684 bp, synthetic construct
  source 1..684: mol_type = other DNA; note = Synthetic
gaaagcaaatatggcccaccatgtcctccatgtccagctccagaatttcttggtggcccaagtgtctttctgtttccacctaaacctaaagacacactcatgatctctaggacacctgaagtcacatgtgttgttgttgatgtttctcaagaagatcctgaagtccagtttaattggtatgttgatggggttgaagtccataatgctaagacaaagcccagggaagaacagtataactccacatacagggttgtgtctgtcctcactgttctgcatcaggattggctcaatgggaaagaatacaaatgtaaagtctcaaacaaggggctccccagctccattgagaaaaccatctctaaggctaaaggccaacctagggaacctcaagtgtataccctgccacctagccagaaagaaatgacaaagaatcaagtctccctcacctgtcttgtcaaaggcttttatcctagtgacattgcagttgagtgggaatccaatgggcagccagaaaacaattataagacaaccccaccagttcttgatagtgatggctcattttttctctactctaaactgacagttgataagagtaggtggcaagagggaaatgtcttttcttgttctgttatgcatgaagctctccacaataggtacacccagaagtctctgtccctgtctccttga

SEQ ID NO: 50 - DNA, 738 bp, synthetic construct
  source 1..738: mol_type = other DNA; note = Synthetic
agaaacacaggcagaggtggagaggaaaagaagaaagagaaagaaaaagaggaacaagaggaaagggaaactaagacccctgagtgccccagccacacacagcctctgggagtgttcctgtttcctccaaagccaaaggacaccctgatgatcagcagaacccctgaagtgacctgtgtggtggtggatgtgtcccaagaggacccagaggtgcagttcaattggtatgtggatggtgttgaggtgcacaatgccaagaccaagcctagagaggaacagttcaacagcacctacagagtggtgtctgtgctgacagtgctgcaccaggactggctgaatggcaaagagtacaagtgcaaggtgtccaacaagggcctgcctagcagcattgaaaagaccatcagcaaggccaagggccagccaagagaaccccaggtgtacacactgcctccaagccaagaagagatgaccaagaaccaggtgtccctgacctgcctggtcaagggcttctacccctctgacattgctgtggaatgggagagcaatggccagcctgagaacaactacaagaccacacctcctgtgctggactctgatggctcattcttcctgtacagcagactgacagtggacaagagcagatggcaagagggcaatgtgttcagctgctctgtgatgcatgaggccctgcacaaccactacacccagaagtctctgagcctgagcctgggcaaatga

SEQ ID NO: 51 - DNA, 699 bp, synthetic construct
  source 1..699: mol_type = other DNA; note = Synthetic
cctagaggccccaccatcaagccctgtcctccatgcaaatgccctgctcctaacctgcttggaggcccctctgtgttcatcttcccacctaagatcaaggatgtgctgatgatctctctgagccccattgtgacctgtgtggtggtggatgtgtctgaggatgacccagatgtgcagatttcttggtttgtgaacaatgtggaagtgcacacagcccagactcagacccacagagaggactacaacagcacactgagagtggtgtctgccctgcctatccagcaccaggattggatgtctggcaaagagttcaagtgcaaagtgaacaacaaggacctgcctgctccaattgagaggaccatctccaagccaaagggctctgtcagggcccctcaagtgtatgtgctgcctcctccagaggaagagatgaccaagaagcaagtcaccctgacatgcatggtcacagacttcatgccagaggacatctatgtggaatggaccaacaatggcaagacagagctgaactacaagaacactgagccagtgctggactctgatggcagctacttcatgtacagcaagctgagggttgagaagaagaactgggttgagagaaacagctacagctgctctgtggtgcatgagggcctgcacaatcaccacaccaccaagagcttcagcagaacccctggcaagtga

SEQ ID NO: 52 - DNA, 699 bp, synthetic construct
  source 1..699: mol_type = other DNA; note = Synthetic
gagcccaagagctgtgacaagacccacacctgtcctccatgtcctgctccagagctgcttgcaggaccttctgtgtttctgttccctccaaagccaaaggacaccctgatgatcagcagaacccctgaagtgacctgtgtggtggtggatgtgtcccatgaggacccagaagtgaagttcaattggtatgtggatggtgttgaggtgcacaatgccaagaccaagcctagagaggaacagtacaacagcacctacagggttgtgtcagtgctgactgtgctgcaccaggactggctgaatggcaaagagtacaagtgcaaggtgtccaacaaggccctgcctcttcctgaggaaaagaccatcagcaaggccaagggacagcctagggaaccccaggtgtacacactgccacctagcagagatgagctgaccaagaatcaggtgtccctgacatgccttgtgaagggcttctacccttctgacattgcagtggaatgggagagcaatggccagcctgagaacaactacaagacaacccctcctgtgctggactctgatggctcattcttcctgtactccaagctgacagtggacaagtccagatggcagcaaggcaatgtgttcagctgctctgtgatgcatgaggccctgcacaaccactacacacagaagtccctgtctctgagccctggcaagtga

SEQ ID NO: 53 - DNA, 699 bp, synthetic construct
  source 1..699: mol_type = other DNA; note = Synthetic
gagcccaagagctgtgacaagacccacacctgtcctccatgtcctgctccagagctgcttgcaggaccttctgtgtttctgttccctccaaagccaaaggacaccctgatgatcagcagaacccctgaagtgacctgtgtggtggtggatgtgtcccatgaggacccagaagtgaagttcaattggtatgtggatggtgttgaggtgcacaatgccaagaccaagcctagagaggaacagtacaacagcacctacagggttgtgtcagtgctgactgtgctgcaccaggactggctgaatggcaaagagtacaagtgcaaggtgtccaacaaggccctgcctcttcctgaggaaaagaccatcagcaaggccaagggacagcctagggaaccccaggtgtacacactgccacctagcagagatgagctgaccaagaatcaggtgtccctgacatgccttgtgaagggcttctacccttctgacattgcagtggaatgggagagcaatggccagcctgagaacaactacaagacaacccctcctgtgctggactctgatggctcattcttcctgtactccaagctgacagtggacaagtccagatggcagcaaggcaatgtgttcagctgctctgtgttgcatgaggccctgcactctcactacacacagaagtccctgtctctgagccctggcaagtga

SEQ ID NO: 54 - DNA, 2424 bp, synthetic construct
  source 1..2424: mol_type = other DNA; note = Synthetic
atggctacaggcagcagaacctctctgctgctggcttttggcctgctgtgtctgccttggctgcaagagggctctgctttccctacaatccctctgagcaggctgtttgacaatgccatgctgagagcccacagactgcaccagctggcctttgacacctaccaagagtttgaagaggcttacatccccaaagagcagaagtacagcttcctccagaatcctcagaccagcctgtgcttctctgagagcatccccacacctagcaacagagaggaaacccagcagaagtccaacctggaactgctgagaatcagcctgctgctgatccagagctggctggaacctgtgcagttcctgagatcagtgtttgccaacagcctggtgtatggggcctctgacagcaatgtgtatgacctgctgaaggacctggaagagggcatccagacactgatgggcagactggaagatggcagccccagaacaggccagattttcaagcagacctacagcaagtttgacaccaacagccacaatgatgatgccctgctcaagaactatgggctgctgtactgcttcagaaaggacatggacaaggtggaaaccttcctgaggattgtgcagtgcagaagtgtggaaggcagctgtggctttggtggaggaggtagtgatgcccacaagtctgaggtggcccacagattcaaggacctgggagaagagaacttcaaggccctggtgctgattgcctttgctcagtacctccagcagtgcccctttgaggaccatgtgaagctggtcaatgaagtgacagagtttgccaagacctgtgtggctgatgagtctgctgagaactgtgacaagagcctgcacaccctgtttggagacaagctgtgtacagtggccacactgagagaaacctatggagagatggctgactgctgtgccaagcaagaacctgagaggaatgagtgcttcctccagcacaaggatgacaaccccaacctgcctagacttgtcagacctgaagtggatgtgatgtgcacagccttccatgacaatgaggaaaccttcctgaagaaatacctgtatgagattgccagaaggcacccctacttctatgcccctgagctgctgttctttgctaagagatacaaggctgcctttacagagtgctgccaggctgctgacaaagctgcctgtctgctgcccaagctggatgagctgagagatgaaggcaaggcctcctctgccaagcagagactgaagtgtgccagcctccagaagtttggagagagagccttcaaggcttgggctgttgccagactgagccagagattccccaaggctgagtttgctgaggtgtccaagctggttacagacctgaccaaggtgcacactgaatgctgccatggggacctgctggaatgtgctgatgacagagctgacctggccaagtacatctgtgaaaaccaggacagcatcagcagcaagctgaaagaatgctgtgaaaagcccctcctggaaaagagccactgcattgcagaggtggaaaatgatgagatgcctgctgatctgcccagccttgcagctgactttgtggaaagcaaggatgtgtgcaagaactatgctgaggccaaagatgtgttcctgggcatgttcctctatgagtatgctagaaggcatcctgactactctgtggtgctgctgctgagactggctaagacctatgagacaacactggaaaagtgctgtgcagctgctgaccctcatgagtgctatgccaaagtgtttgatgagttcaagcctctggtggaagaaccccagaacctgatcaagcagaattgtgaactgtttgagcagctgggagagtacaagttccagaatgccctgcttgtcagatacaccaagaaggtgccccaggtttccacacctacactggttgaagtgtccagaaatctgggcaaagtgggcagcaagtgctgcaagcacccagaggccaagaggatgccatgtgctgaggactacctgtcagtggtgctgaaccagctgtgtgtcctgcatgagaaaacccctgtgtctgacagagtgacaaagtgttgcacagagagcctggtcaacagaaggccttgcttctctgccctggaagttgatgagacatatgtgcccaaagagttcaatgctgagacattcaccttccatgctgacatctgcaccctgtctgagaaagagaggcagatcaagaaacagactgccctggtggaactggtcaagcacaagcccaaggccaccaaagaacaactgaaggcagtgatggatgactttgctgcctttgttgagaagtgctgtaaagcagatgacaaagagacatgctttgctgaagagggcaagaaactggtggctgcctctcaggctgctctgggactttaa

SEQ ID NO: 55 - DNA, 2433 bp, synthetic construct
  source 1..2433: mol_type = other DNA; note = Synthetic
ggtaaccaagccaccatgaaatgggtcacattcatcagcctgctgtttctgttcagctctgcctacagcaggggagtgttcagaagagatgcccacaagtctgaggtggcccacagattcaaggacctgggagaagagaacttcaaggccctggtgctgattgcctttgctcagtacctccagcagtgcccctttgaggaccatgtgaagctggtcaatgaagtgacagagtttgccaagacctgtgtggctgatgagtctgctgagaactgtgacaagagcctgcacaccctgtttggagacaagctgtgtacagtggccacactgagagaaacctatggagagatggctgactgctgtgccaagcaagaacctgagaggaatgagtgcttcctccagcacaaggatgacaaccccaacctgcctagacttgtcagacctgaagtggatgtgatgtgcacagccttccatgacaatgaggaaaccttcctgaagaaatacctgtatgagattgccagaaggcacccctacttctatgcccctgagctgctgttctttgctaagagatacaaggctgcctttacagagtgctgccaggctgctgacaaagctgcctgtctgctgcccaagctggatgagctgagagatgaaggcaaggcctcctctgccaagcagagactgaagtgtgccagcctccagaagtttggagagagagccttcaaggcttgggctgttgccagactgagccagagattccccaaggctgagtttgctgaggtgtccaagctggttacagacctgaccaaggtgcacactgaatgctgccatggggacctgctggaatgtgctgatgacagagctgacctggccaagtacatctgtgaaaaccaggacagcatcagcagcaagctgaaagaatgctgtgaaaagcccctcctggaaaagagccactgcattgcagaggtggaaaatgatgagatgcctgctgatctgcccagccttgcagctgactttgtggaaagcaaggatgtgtgcaagaactatgctgaggccaaagatgtgttcctgggcatgttcctctatgagtatgctagaaggcatcctgactactctgtggtgctgctgctgagactggctaagacctatgagacaacactggaaaagtgctgtgcagctgctgaccctcatgagtgctatgccaaagtgtttgatgagttcaagcctctggtggaagaaccccagaacctgatcaagcagaattgtgaactgtttgagcagctgggagagtacaagttccagaatgccctgcttgtcagatacaccaagaaggtgccccaggtttccacacctacactggttgaagtgtccagaaatctgggcaaagtgggcagcaagtgctgcaagcacccagaggccaagaggatgccatgtgctgaggactacctgtcagtggtgctgaaccagctgtgtgtcctgcatgagaaaacccctgtgtctgacagagtgacaaagtgttgcacagagagcctggtcaacagaaggccttgcttctctgccctggaagttgatgagacatatgtgcccaaagagttcaatgctgagacattcaccttccatgctgacatctgcaccctgtctgagaaagagaggcagatcaagaaacagactgccctggtggaactggtcaagcacaagcccaaggccaccaaagaacaactgaaggcagtgatggatgactttgctgcctttgttgagaagtgctgtaaagcagatgacaaagagacatgctttgctgaagagggcccgaaactggtggctgcctctcaggctgctctgggacttggtggaggaggtagtttccctacaatccctctgagcaggctgtttgacaatgccatgctgagagcccacagactgcaccagctggcctttgacacctaccaagagtttgaagaggcttacatccccaaagagcagaagtacagcttcctccagaatcctcagaccagcctgtgcttctctgagagcatccccacacctagcaacagagaggaaacccagcagaagtccaacctggaactgctgagaatcagcctgctgctgatccagagctggctggaacctgtgcagttcctgagatcagtgtttgccaacagcctggtgtatggggcctctgacagcaatgtgtatgacctgctgaaggacctggaagagggcatccagacactgatgggcagactggaagatggcagccccagaacaggccagattttcaagcagacctacagcaagtttgacaccaacagccacaatgatgatgccctgctcaagaactatgggctgctgtactgcttcagaaaggacatggacaaggtggaaaccttcctgaggattgtgcagtgcagaagtgtggaaggcagctgtggcttctga

SEQ ID NO: 56 - DNA, 738 bp, synthetic construct
  source 1..738: mol_type = other DNA; note = Synthetic
atggctacaggcagcagaacctctctgctgctggcttttggcctgctgtgtctgccttggctgcaagagggctctgctttccctacaatccctctgagcaggctgtttgacaatgccatgctgagagcccacagactgcaccagctggcctttgacacctaccaagagtttgaagaggcttacatccccaaagagcagaagtacagcttcctccagaatcctcagaccagcctgtgcttctctgagagcatccccacacctagcaacagagaggaaacccagcagaagtccaacctggaactgctgagaatcagcctgctgctgatccagagctggctggaacctgtgcagttcctgagatcagtgtttgccaacagcctggtgtatggggcctctgacagcaatgtgtatgacctgctgaaggacctggaagagggcatccagacactgatgggcagactggaagatggcagccccagaacaggccagattttcaagcagacctacagcaagtttgacaccaacagccacaatgatgatgccctgctcaagaactatgggctgctgtactgcttcagaaaggacatggacaaggtggaaaccttcctgaggattgtgcagtgcagaagtgtggaaggcagctgtggcttcagcagctcctctaaggctccacctcctagccttccatctccttctaggctgcctgggccaagtgacacacccattctgccacagtga

SEQ ID NO: 57 - DNA, 822 bp, synthetic construct
  source 1..822: mol_type = other DNA; note = Synthetic
atggctacaggcagcagaacctctctgctgctggcttttggcctgctgtgtctgccttggctgcaagagggctctgccagctctagctctaaggcccctccaccttctctgccatctccaagcagactgcctggaccttctgacacccctatcctgcctcagttccctacaatccctctgagcaggctgtttgacaatgccatgctgagagcccacagactgcaccagctggcctttgacacctaccaagagtttgaagaggcttacatccccaaagagcagaagtacagcttcctccagaatcctcagaccagcctgtgcttctctgagagcatccccacacctagcaacagagaggaaacccagcagaagtccaacctggaactgctgagaatcagcctgctgctgatccagagctggctggaacctgtgcagttcctgagatcagtgtttgccaacagcctggtgtatggggcctctgacagcaatgtgtatgacctgctgaaggacctggaagagggcatccagacactgatgggcagactggaagatggcagccccagaacaggccagattttcaagcagacctacagcaagtttgacaccaacagccacaatgatgatgccctgctcaagaactatgggctgctgtactgcttcagaaaggacatggacaaggtggaaaccttcctgaggattgtgcagtgcagaagtgtggaaggcagctgtggcttcagcagctcctctaaggctccacctcctagccttccatctccttctaggctgcctgggccaagtgacacacccattctgccacagtga

SEQ ID NO: 58 - DNA, 738 bp, synthetic construct
  source 1..738: mol_type = other DNA; note = Synthetic
atggctacaggcagcagaacctctctgctgctggcttttggcctgctgtgtctgccttggctgcaagagggctctgccagctctagctctaaggcccctccaccttctctgccatctccaagcagactgcctggaccttctgacacccctatcctgcctcagttccctacaatccctctgagcaggctgtttgacaatgccatgctgagagcccacagactgcaccagctggcctttgacacctaccaagagtttgaagaggcttacatccccaaagagcagaagtacagcttcctccagaatcctcagaccagcctgtgcttctctgagagcatccccacacctagcaacagagaggaaacccagcagaagtccaacctggaactgctgagaatcagcctgctgctgatccagagctggctggaacctgtgcagttcctgagatcagtgtttgccaacagcctggtgtatggggcctctgacagcaatgtgtatgacctgctgaaggacctggaagagggcatccagacactgatgggcagactggaagatggcagccccagaacaggccagattttcaagcagacctacagcaagtttgacaccaacagccacaatgatgatgccctgctcaagaactatgggctgctgtactgcttcagaaaggacatggacaaggtggaaaccttcctgaggattgtgcagtgcagaagtgtggaaggcagctgtggcttctga

SEQ ID NO: 59 - DNA, 3393 bp, synthetic construct
  source 1..3393: mol_type = other DNA; note = Synthetic
atggccacaggcagcagaacatctctgctgctggcttttggcctgctgtgcctgccttggctgcaagagggaagtgctgctgaacctgctggcagccctacaagcacagaagagggaacacctggctctggcacagcttcttctagccctggaagcagcacaccttctggtgctacaggatctcctggggcctctcctggaacatcttctacaggttctccaggcagccctgctggctctcctacatctacagaggaaggcacctctgagtctgccacacctgagtctggacctggcacctctacagagccatctgaaggatctgctccaggctcaccagctggctccccaacttcaactgaagagggcacaagcactgaaccctctgagggctctgcccctggaacttcaacagaaccttcagagggatcagccccagggacatcagagtctgctactccagaatctggcccaggctctgagccagccacatctggatctgagacaccaggatcagaacctgccacctctggctctgaaacccctggatctccagcaggctctcccactagcactgaggaagggacatctgaatcagcaaccccagagagtggccctggcaccagtactgaaccatcagaaggctcagcacctgggaccagcacagaaccatctgagggtagtgctccaggttctcctgctggaagcccaacctccacagaagaaggtactagcactgagccaagtgaaggctctgccccaggcacatcaactgagccatcagaaggatctgcccctggcacctctgaaagtgctacccctgaatcaggaccagggacctcaactgaacctagtgaaggatcagctcctggaacttctgaatcagccactcctgaatcaggccctggaagtgaaccagctacttcaggatctgaaactccaggcacttccacagaaccctcagaaggctctgctccagggacttctactgaaccatctgagggatcagcaccaggcaccagtgaatctgcaaccccagaatctggacctggaacaagtgaatcagctacccctgagtctggcccaggatcaccagcaggatcacctacctctactgaagagggaacctcagaaagtgccactccagagagtggaccaggatctgagccagctacttcaggctcagagacacctggcacatctgaatctgctacaccagagtcaggccctgggacatccactgagccatctgaaggcagtgcaccaggcacctccactgaaccatctgaaggctcagccccaggcacttctacagaacccagtgaaggatctgcaccagggaccagtactgaaccttctgaaggatctgctcctggcaccagcacagagccaagtgaaggatcagcacctggcacctcaactgaaccctctgagggaagtgctcctggcagtcctgctggatcaccaaccagcactgaagaggggacctctacagaaccctctgagggatctgcacctgggacctctgagtcagcaacaccagaatcaggtcctggctctgaacctgctacttctggtagtgaaaccccagggacctctgaaagtgcaacaccagagtctggccctggatctgaaccagcaaccagtggctctgagactcctggtacttcagagagtgcaacacctgaaagtggcccagggaccagcacagagccatcagaaggctctgcaccaggcacatctgagtctgctacccctgaaagtggacctggctctcctgctgggagtcccacaagtactgaagaaggttccccagcagggtccccaacatccactgaagaaggatcaccagctggcagccccacttccacagaggaaggcacatcagaatcagctactccagagtctggacctggtactagcacagaaccatcagagggaagtgcccctggaacatctgagagtgccacaccagaatcaggacctggatctgagccagccacctctggtagtgaaactcctggtacttctgagtctgcaaccccagagtcaggcccaggatcagaaccagctacttctggcagtgaaacacctggcacctcagaatcagcaacacctgaatctggaccaggcactagcacagaaccatctgaaggatcagcccctggctctcctgctggctctccaacttctacagaagagggaacttctgaaagtgcaactcctgaatctggaccaggatctgaacctgcaacttctggatcagagacaccagggacctcagagagtgctactcctgagtcaggtcctggcagcccagctggaagccccacaagtacagaggaaggatctcctgctgggtcccctaccagtacagaagaaggcacttctactgaaccctcagaaggatcagcccctggtacaagtgaatctgccactccagagtcaggaccaggcacttcagagtcagcaactcctgagagtggtccaggcacttcagaaagtgctaccccagagtctggtccaggcagtgaacctgctacaagtggctctgaaacaccaggctctgaaccagctacttctggctctgagactcctggctcaccagctggcagtcctacctctacagaagaagggacttcaacagaaccatctgagggcagtgcacctggcacaagcacagagccatctgaaggatctgcacctggatctgaaccagctacctctggatcagaaacccctggaacctctgaatcagctaccccagaaagtggaccaggcacatccacagaaccatcagagggatctgcaccaggattccctacaatcccactgagcagactgtttgacaatgccatgctgagagcccacagactgcatcagctggcctttgacacctaccaagagtttgaagaggcttacatccccaaagagcagaagtacagcttcctgcaaaacccacagaccagcctgtgcttctctgagagcatccccacacctagcaacagagaggaaacccagcagaagtccaatctggaactgctgagaatctcactgctgctgatccagtcttggctggaacctgtgcagttcctgagatcagtgtttgccaacagtctggtgtatggggcttctgacagcaatgtgtatgacctgctgaaagacctggaagagggtatccagacactgatgggcagactggaagatggctcccctagaacaggccagattttcaagcagacctacagcaagtttgacaccaacagccacaatgatgatgccctgctcaagaactatgggctgctgtactgtttcagaaaggacatggacaaggtggaaaccttcctgagaattgtgcagtgcagaagtgtggaaggcagctgtggcttttga

SEQ ID NO: 60 - DNA, 3831 bp, synthetic construct
  source 1..3831: mol_type = other DNA; note = Synthetic
atggccacaggcagcagaacatctctgctgctggcttttggcctgctgtgcctgccttggctgcaagagggaagtgctgctgaacctgctggcagccctacaagcacagaagagggaacacctggctctggcacagcttcttctagccctggaagcagcacaccttctggtgctacaggatctcctggggcctctcctggaacatcttctacaggttctccaggcagccctgctggctctcctacatctacagaggaaggcacctctgagtctgccacacctgagtctggacctggcacctctacagagccatctgaaggatctgctccaggctcaccagctggctccccaacttcaactgaagagggcacaagcactgaaccctctgagggctctgcccctggaacttcaacagaaccttcagagggatcagccccagggacatcagagtctgctactccagaatctggcccaggctctgagccagccacatctggatctgagacaccaggatcagaacctgccacctctggctctgaaacccctggatctccagcaggctctcccactagcactgaggaagggacatctgaatcagcaaccccagagagtggccctggcaccagtactgaaccatcagaaggctcagcacctgggaccagcacagaaccatctgagggtagtgctccaggttctcctgctggaagcccaacctccacagaagaaggtactagcactgagccaagtgaaggctctgccccaggcacatcaactgagccatcagaaggatctgcccctggcacctctgaaagtgctacccctgaatcaggaccagggacctcaactgaacctagtgaaggatcagctcctggaacttctgaatcagccactcctgaatcaggccctggaagtgaaccagctacttcaggatctgaaactccaggcacttccacagaaccctcagaaggctctgctccagggacttctactgaaccatctgagggatcagcaccaggcaccagtgaatctgcaaccccagaatctggacctggaacaagtgaatcagctacccctgagtctggcccaggatcaccagcaggatcacctacctctactgaagagggaacctcagaaagtgccactccagagagtggaccaggatctgagccagctacttcaggctcagagacacctggcacatctgaatctgctacaccagagtcaggccctgggacatccactgagccatctgaaggcagtgcaccaggcacctccactgaaccatctgaaggctcagccccaggcacttctacagaacccagtgaaggatctgcaccagggaccagtactgaaccttctgaaggatctgctcctggcaccagcacagagccaagtgaaggatcagcacctggcacctcaactgaaccctctgagggaagtgctcctggcagtcctgctggatcaccaaccagcactgaagaggggacctctacagaaccctctgagggatctgcacctgggacctctgagtcagcaacaccagaatcaggtcctggctctgaacctgctacttctggtagtgaaaccccagggacctctgaaagtgcaacaccagagtctggccctggatctgaaccagcaaccagtggctctgagactcctggtacttcagagagtgcaacacctgaaagtggcccagggaccagcacagagccatcagaaggctctgcaccaggcacatctgagtctgctacccctgaaagtggacctggctctcctgctgggagtcccacaagtactgaagaaggttccccagcagggtccccaacatccactgaagaaggatcaccagctggcagccccacttccacagaggaaggcacatcagaatcagctactccagagtctggacctggtactagcacagaaccatcagagggaagtgcccctggaacatctgagagtgccacaccagaatcaggacctggatctgagccagccacctctggtagtgaaactcctggtacttctgagtctgcaaccccagagtcaggcccaggatcagaaccagctacttctggcagtgaaacacctggcacctcagaatcagcaacacctgaatctggaccaggcactagcacagaaccatctgaaggatcagcccctggctctcctgctggctctccaacttctacagaagagggaacttctgaaagtgcaactcctgaatctggaccaggatctgaacctgcaacttctggatcagagacaccagggacctcagagagtgctactcctgagtcaggtcctggcagcccagctggaagccccacaagtacagaggaaggatctcctgctgggtcccctaccagtacagaagaaggcacttctactgaaccctcagaaggatcagcccctggtacaagtgaatctgccactccagagtcaggaccaggcacttcagagtcagcaactcctgagagtggtccaggcacttcagaaagtgctaccccagagtctggtccaggcagtgaacctgctacaagtggctctgaaacaccaggctctgaaccagctacttctggctctgagactcctggctcaccagctggcagtcctacctctacagaagaagggacttcaacagaaccatctgagggcagtgcacctggcacaagcacagagccatctgaaggatctgcacctggatctgaaccagctacctctggatcagaaacccctggaacctctgaatcagctaccccagaaagtggaccaggcacatccacagaaccatcagagggatctgcaccaggattccctacaatcccactgagcagactgtttgacaatgccatgctgagagcccacagactgcatcagctggcctttgacacctaccaagagtttgaagaggcttacatccccaaagagcagaagtacagcttcctgcaaaacccacagaccagcctgtgcttctctgagagcatccccacacctagcaacagagaggaaacccagcagaagtccaatctggaactgctgagaatctcactgctgctgatccagtcttggctggaacctgtgcagttcctgagatcagtgtttgccaacagtctggtgtatggggcttctgacagcaatgtgtatgacctgctgaaagacctggaagagggtatccagacactgatgggcagactggaagatggctcccctagaacaggccagattttcaagcagacctacagcaagtttgacaccaacagccacaatgatgatgccctgctcaagaactatgggctgctgtactgtttcagaaaggacatggacaaggtggaaaccttcctgagaattgtgcagtgcagaagtgtggaaggcagctgtggctttggagggacctcagaatctgccactcctgagtctggcccagggacaagtacagaaccatctgagggctctgctccaggcaccagtacagaaccatcagaaggatctgccccagggacttcagaatcagccacaccagaaagtggtcctggaaccagcactgaaccatcagagggatcagcccctggcactagcactgaaccatctgagggaagtgcaccagggacctcagaatctgctacccctgaatcaggccctggcacctccacagaacccagtgaaggcagtgctcctggcacatctacagaaccctcagaaggatctgctcctggcacatccacagaaccctctgagggcagtgccccaggatcaccagctggaagtccaactagcacagaagagggcaccagtacagagccaagtgaaggcagtgcccctggatga

SEQ ID NO: 61 - DNA, 1092 bp, synthetic construct
  source 1..1092: mol_type = other DNA; note = Synthetic
atggccacaggcagcagaacatctctgctgctggcttttggcctgctgtgcctgccttggctgcaagagggaagtgctttccctacaatcccactgagcagactgtttgacaatgccatgctgagagcccacagactgcatcagctggcctttgacacctaccaagagtttgaagaggcttacatccccaaagagcagaagtacagcttcctgcaaaacccacagaccagcctgtgcttctctgagagcatccccacacctagcaacagagaggaaacccagcagaagtccaatctggaactgctgagaatctcactgctgctgatccagtcttggctggaacctgtgcagttcctgagatcagtgtttgccaacagtctggtgtatggggcttctgacagcaatgtgtatgacctgctgaaagacctggaagagggtatccagacactgatgggcagactggaagatggctcccctagaacaggccagattttcaagcagacctacagcaagtttgacaccaacagccacaatgatgatgccctgctcaagaactatgggctgctgtactgtttcagaaaggacatggacaaggtggaaaccttcctgagaattgtgcagtgcagaagtgtggaaggcagctgtggctttggagggacctcagaatctgccactcctgagtctggcccagggacaagtacagaaccatctgagggctctgctccaggcaccagtacagaaccatcagaaggatctgccccagggacttcagaatcagccacaccagaaagtggtcctggaaccagcactgaaccatcagagggatcagcccctggcactagcactgaaccatctgagggaagtgcaccagggacctcagaatctgctacccctgaatcaggccctggcacctccacagaacccagtgaaggcagtgctcctggcacatctacagaaccctcagaaggatctgctcctggcacatccacagaaccctctgagggcagtgccccaggatcaccagctggaagtccaactagcacagaagagggcaccagtacagagccaagtgaaggcagtgcccctggatga

SEQ ID NO: 62 - DNA, 9795 bp, synthetic construct; identical to SEQ ID NO: 16
  source 1..9795: mol_type = other DNA; note = Synthetic

SEQ ID NO: 63 - protein, 121 aa, Homo sapiens
EVQLVQSGAEVSQPGESLKISCKGSGYSFTGYWISWVRQMPGKGLEWMGIIYPGDSDTKYTPSFQGQVTISTDKSINTAYLQWSSLKASDTAMYYCARRGDGLYYYGMDVWGQGTTVTVSS

SEQ ID NO: 64 - protein, 124 aa, Homo sapiens
EVQLVESGPGLVKPSETLSLTCTASGGSISTYYWSWIRQPPGKGLEWIGYIYYSGSTNYNPSLKSRVTISVDTSKNQFSLKLSSVTAADTAVYYCARDRIAPVGKFFGWYFDLWGRGTLVTVSS

SEQ ID NO: 65 - protein, 117 aa, Homo sapiens
EVQLVESGGGLVQPGGSLRLSCAASGFTFSTYAMHWVRQAPGKGLEYVSGISSNGGSTYYANSVKGRFTISRDNSKNTLYIQMGSLRAEDMAVYYCARSSSRGFDYWGQGTLVTVSS

SEQ ID NO: 66 - protein, 124 aa, Homo sapiens
EVQLVESGPGLVKPSETLSLTCAVSGDSTSSSSSYWDWIRQPPGKGLEWIGNIYYTGTTYYNPSLKSRVTISVDTSKDQFSLKLSSVTAADTAVYYCARELFTAVAGKGGIDYWGQGTLVTVSS

SEQ ID NO: 67 - protein, 129 aa, Homo sapiens
QVQLVQSGGGVVQPGRSLRLSCAAPGFTFSSYGMHWVRQAPGKGLEWVAVISYDGSNKYYADSVKGRFTISRDNSKNTLYLQMNSLRAEDTAVYYCAKDFKGGSSSWYTPEIEYGMDVWGQGTTVTVSS

SEQ ID NO: 68 - protein, 135 aa, Homo sapiens
QVQLVQSGSELKKPGASVKVSCKASGYTFTSYAMNWVRQAPGQGLEWMGWINTNTGNPTYAQGFTGRFVFSLDTSVSTAYLQISSLKAEDTAVYYCARLIRHEAHTYCSGGSCYSPDYYYGMDVWGQGTMVTVSS

SEQ ID NO: 69 - protein, 120 aa, Homo sapiens
EVQLLQSGGGLVQPGGSLRLSCVASGFTFSSYEMNWVRQAPGKGLEWVSYISTSGSTINYADSVKGRFSISRDNAKKSLYLQMNSLRAEDTAVYYCASNPPLGEPYFDIWGQGTMVTVSS

SEQ ID NO: 70 - protein, 119 aa, Homo sapiens
EVQLLESGGGVVQPGRSLRLSCAASGFTFSNYAMHWVRQAPGKGLEWVAVISYDGSNKYYADSVKGRFTISRDNSKNTLYLQMNSLRAEDTAVYYCARWGGGMQYLDVWGQGTTVTVSS

SEQ ID NO: 71 - protein, 126 aa, Homo sapiens
EVQLVQSGSELKKPGASVKVSCKASGYTFTSYAMNWVRQAPGQGLEWMGWINTNTGNPTYAQGFTGRFVFSLDTSVSTAYLQISSLKAEDTAVYYCARAGPNYDFWSGYYQTFDYWGQGTMVTVSS

SEQ ID NO: 72 - protein, 124 aa, Homo sapiens
EVQLVQSGAEVKKPGASVKVSCKVSGYTLTELSMHWVRQAPGKGLEWMGGFDPEDGETIYAQKFQGRVTMTEDTSTDTAYMELSSLRSEDTAVYYCATATAMDGYYYYYGMDVWGQGTTVTVSS

SEQ ID NO: 73 - protein, 121 aa, Homo sapiens
EVQLVESGAEVKKPGESLKISCKGSGYSFTSYWIGWVRQMPGEGLEWMGIIYPGDSDTRYSPSFQGQVTISADKSISTAYLQWSSLKASDTAMYYCASAGSSWYGDAFDIWGQGTMVTVSS

SEQ ID NO: 74 - protein, 122 aa, Homo sapiens
QVQLVQSGAEVKKPGASVKVSCKVSGCTLTELSMHWVRQAPGKGLEWMGGFDPEDGETIYAQKFQGRVTMTEDTSTDTAYMELSSLRSEDTAVYYCATATIFGVANNWFDPWGQGTTVTVSS

SEQ ID NO: 75 - protein, 132 aa, Homo sapiens
QVQLVQSGGGVVQPGRSLRLSCAASGFTFSSYGMHWVRQAPGKGLEWVAVISYDGSNKYYADSVKGRFTISRDNSKNTLYLQMNSLRAEDTAVYYCAKDLGYYDILTGQLGGYYYYYGMDVWGQGTTVTVSS

SEQ ID NO: 76 - protein, 126 aa, Homo sapiens
QVQLVQSGGGLVQPGGSLRLSCAASGFTFSSYWMSWVRQAPGKGLEWVANINQDGSEKYYVDSVKGRFTISRDNAKNSLYLQMNSLRAEDTAVYYCARDWDYDILTGSWFGAFDIWGQGTMVTVSS

SEQ ID NO: 77 - protein, 121 aa, Mus musculus
QVQLKESGPGLVAPSQSLSITCTVSGFSLTSYAISWVRQPPGKGLEWLGVIWTGGGTNYNSALKSRLSISKDNSKSQVFLKMNSLQTDDTARYYCARKDYYYGSSYAMDYWGQGTSVTVSS

SEQ ID NO: 78 - protein, 121 aa, Mus musculus
EVQLQQSGAELVRPGASVKLSCKASGYTFSDYYINWVKQRPGQGLEWIARIYPGSGNTYYNEKFTGKATLTAEKSSSTAYMQLSSLTSEDSAVYFCARDYGSSYVDYFDYWGQGTTLTVSS

SEQ ID NO: 79 - protein, 121 aa, Mus musculus
EVQLQQSGAELVRPGASVKLSCTASGFNIKDDYMHWVKQRPEQGLEWIGWINPENGDTEYASKFQGKAAITADTSSNTACLQLSSLTSEDTAVYYCSTGGYGNYVDAMDYWGQGTSVTVSS

SEQ ID NO: 80 - protein, 121 aa, Mus musculus
QVQLKESGPGLVAPSQSLSITCTVSGFSLTSYAISWVRQPPGKGLEWLGVIWTGGGTNYNSALKSRLSISKDNSKSQVFLKMNSLQTDDTARYYCARKDYYGSSSNVMDYWGQGTSVTVSS

SEQ ID NO: 81 - protein, 120 aa, Mus musculus
QVQLKESGPGLVAPSQSLSITCTVSGFSLTNYAINWVRQPPGKGLEWLGVIWTGGGTNYNSALRSRLSISKDNSKSQVFLKMNSLHTDDTARYYCARKDYYGSSLAMDYWGQGTSVTVSS

SEQ ID NO: 82 - protein, 121 aa, Mus musculus
EVQLQQSGPELVKPGASVKISCKASGYSFTDYYMNWVKQSPEKSLEWIGEINPSTGGPTYNQKFKAKATVTVDKSSSTAYMQLKSLTSEDSAVYYCARRNYDLYYYAMDYWGQGTSVTVSS

SEQ ID NO: 83 - protein, 124 aa, Mus musculus
EVQLQQSGAELAKPGASVKLSCKASGYTFTNYWMHWVKQRPGQGLEWIGYINPSSGYTKFNQKFNDKATLTADKSSTTAYMQLSSPTYEDSAVYYCARSDYYGSSYVGYAMDYWGQGTSVTVSS

SEQ ID NO: 84 - protein, 121 aa, Mus musculus
EVQLQQPGPELVKPGASVKISCKASGYSFTDYYMNWVKQSPEKSLEWIGEINPSTGGTSYNQKFKGKATLTVDKSSSTAYMQLKSLTSEDSAVYYCARRNYDLYYYAMDYWGQGTSVTVSS

SEQ ID NO: 85 - protein, 121 aa, Mus musculus; identical to SEQ ID NO: 79

SEQ ID NO: 86 - protein, 121 aa, Mus musculus; identical to SEQ ID NO: 80

SEQ ID NO: 87 - protein, 121 aa, Mus musculus
EVQLQQPGPELVKPGASVKISCKASGYSFTDYYMNWVKQSPEKSLEWIGEINPSTGGTSYNQKFKGKATLTVDKSSSTAYMQLKSLTSEDSAVYYCSRRNYDLYYYAMDYWGQGTSVTVSS

SEQ ID NO: 88 - protein, 114 aa, Mus musculus
EVQLQQSGPELVKPGASVKISCKASGYSFTGYSMNWVKKSPEKSLEWIGEINPSTGGTTYNQKFKAKATLTVDKSSSTAYIQLKSLTSEDSAVYYCARGAGAYWGQGTLVTVSA

SEQ ID NO: 89 - protein, 118 aa, Mus musculus
EVQLQQSGPELVKPGASVKISCKASGYAFSSSWMNWVKQRPGKGLEWIGRIYPGDGDTNYNGKFKGKATLTADKSSSTAYMQLSSLTSEDSAVYFCARDHGPAWFAYRGQGTLVTVSA

SEQ ID NO: 90 - protein, 114 aa, Mus musculus; identical to SEQ ID NO: 88

SEQ ID NO: 91 - protein, 119 aa, Mus musculus
QVQLKESGPGLVAPSQSLSITCTVSGFSLTNYAISWVRQPPGKGLEWLGVIWTGGGTNYNSALKSRLSISKDNSKSQVFLKMNSLQTDDTARYYCARISYYDYEGVDYWGQGTTLTVSS

SEQ ID NO: 92 - protein, 127 aa, Mus musculus
QVQLVESGGGLVQPGGSLRLSCAASGFTFSSYAMHWVRQAPGKGLEYVSAISGNGGSTYYAKSVKGRFTISRDNSKNTLYLQMGSLRAEDMAVYYCARGAEYYDFWSGYYSAYFDYWGQGTLVTVSS

SEQ ID NO: 93 - protein, 120 aa, Mus musculus
QVQLKQSGPGLVAPSQSLSITCTVSGFSLINYAISWVRQPPGKGLEWLGVIWTGGGTNYNSALKSRLSISKDNSKSQVFLKMNSLQTDDTARYYCARKDYYGRYYGMDYWGQGTSVTVSS

SEQ ID NO: 94 - protein, 118 aa, Mus musculus
EVQLQQPGAELVKPGASVKVSCKASGYIFTNYWMHWVKQRPGQGLEWIGRIHPSDSDTKYNQKFKGKATLTVDKSSSTAYMQLSSLTSEDSAVYYCAILDSYWYFDVWGTGTTVTVSS

SEQ ID NO: 95 - protein, 119 aa, Mus musculus
EVQLQQSGPELVKPGASVKISCKASGYAFSSSWMNWVKQRPGKGLEWIGRIYPGDGDTNYNGKLKGKATLTADKSSSTAYMQLSSLTSEDSAVYFCARKSYGYWHFDVWGTGTTVTVSS

SEQ ID NO: 96 - protein, 114 aa, Mus musculus
EVQLQQPGPELVKPGTSVKISCKASGYTFTDYYMNWVKQSHGKSLEWIGDINPNNGGTNYNQKFKGKATLTVDKSSSTAYMELRSLTSEDSAVCYCAAGKGDYWGQGTTLTVSS

SEQ ID NO: 97 - protein, 118 aa, Mus musculus; identical to SEQ ID NO: 94

SEQ ID NO: 98 - protein, 114 aa, Mus musculus
EVQLQQSGPELVKPGTSVKISCKASGYTFTDYYMNWVKQSHGKSLEWIGDINPNNGGTNYNQKFKGKATLTVDKSSSTAYMELRSLTSEDSAVYYCAAGKGDYWGQGTTLTVSS

SEQ ID NO: 99 - protein, 120 aa, Mus musculus
EVQLQQSGPELVKPGASVKISCKASGYTFTDYYMNWVKQSHGKSLEWIGDINPNNGGTSYNQKFKGKATLTVDKSSSTAYMELRSLTSEDSAVYYCARKGDGYYGGFAYWGQGTLVTVSA

SEQ ID NO: 100 - protein, 122 aa, Mus musculus
EVQLQQSVADLVRPGASVKLSCTASGFNIKNTYMHWVKQRPEQGLEWIGRIDPTNGDTKYVSKFQGKATITADTSSNTAYLQLSSLTSEDTAIYYCATYGSYYLYYYAMNYWGQGTSVTVSS

SEQ ID NO: 101 - protein, 121 aa, Mus musculus
EVQLQQPGAELVRPGASVKLSCKASGYTFTDYYINWVKQRPGQGLEWIARIYPGTGTTYYNEKFKGKATLTAEKSSSTAYMQLSSLTSEDSAVYFCARYDGNLYYYAMDYWGQGTSVTVSS

SEQ ID NO: 102 - protein, 120 aa, Mus musculus
EVQLQQPGAELVKPGASVKMSCKASGYTFTSYWITWVKQRPGQGLEWIGDIYPGSGSTKYNEKFRSEATLTVDTSSTTAYMQLSSLTSEDSAVYYCARWDFYGSRTFDYWGQGTTLTVSS

SEQ ID NO: 103 - protein, 120 aa, Mus musculus
EVQLQQSGAELVKPGASVKMSCKASGYTFTSYWITWVKQRPGQGLEWIGDIYPGSGSTKYNEKFRSEATLTVDTSSTTAYMQLSSLTSEDSAVYYCARWDFYGSRTFDYWGQGTTLTVSS

SEQ ID NO: 104 - protein, 118 aa, Homo sapiens
EVQLVESGGGLVQPGGSLRLSCAASGFTVSSNYMSWVRQAPGKGLEWVSVIYSGGSTYYADSVKGRFTISRDNSKNTLYLQMNSLRAEDTAVYYCARATWLRGVMDVWGQGTTVTVSS

SEQ ID NO: 105 - protein, 126 aa, Homo sapiens
EVQLVESGGGLVQPGRSLRLSCAASGFTFDDYVMHWVRQAPGKGLEWVSGINWNSGSIGYADSVKGRFTISRDNAKNSLYLQMNSLRAEDTALYYCAKDVRYCSSTSCYFSAFDIWGQGTMVTVSS

SEQ ID NO: 106 - protein, 120 aa, Homo sapiens
EVQLVESGGGVVQPGRSLRLSCAASGFTFSGYAMHWVRQAPGKGLEWVAVISYDGSNKYYADSVKGRFTISRDNSKNTLYLQMNSLRAEDTAVYYCARGGGSYYYWFDPWGQGTMVTVSS

SEQ ID NO: 107 - protein, 123 aa, Homo sapiens
EVQLVQWGAGLLKPSETLSLTCAVYGGSFSGYYWSWIRQPPGKGLEWIGEINHSGSTNYNPSLKSRVTISVDTSKNQFSLKLSSVTAADTAVYYCARAGYSSSWYGVRGVDPWGQGTMVTVSS

SEQ ID NO: 108 - protein, 124 aa, Homo sapiens
QVQLLQSGGGVVQPGRSLRLSCAASGFTFSTYGMHWVRQAPGKGLEWVAVISYDGSNKYYADSVKGRFTISRDNSKNTLYLQMNSLRAEDTAVYYCAKGSDIVVVPVGNWFDPWGQGTLVTVSS

SEQ ID NO: 109 - protein, 128 aa, Homo sapiens
QVQLQESGPGLVKPSETLSLACTVSGGSVSSDNSYWSWIRQPPGKGLEWIGYTFHSGSANYNPSLKSRVTISVDTSKNQFSLKLSSVTAADTAVYYCARVQRYYPDSSGFYGRRFDIWGQGTLVTVSS

SEQ ID NO: 110 - protein, 121 aa, Homo sapiens
EVQLVESGGGVVQPGRSLRLSCAASGFTFSTYSMHWVRQAPGKGLEWVAVISYDGSNKYYADSVKGRFTISRDNSKNTLYLQVNSLRAEDTAVYYCARSGGGSYRGPFDYWGQGTLVTVSS

SEQ ID NO: 111 - protein, 124 aa, Homo sapiens
EVQLVESGPGLVKPSETLSLTCTVSGGSISSSSYYWGWIRQPPGKGLEWIGSIYYSGSTYYNPSLKSRVTISVDTSKNQFSLKLSSVTAADTAVYYSARGDRIQLWLLDAFDIWGQGTMVTVSS

SEQ ID NO: 112 - protein, 124 aa, Homo sapiens
EVQLVESGGGLVQPGGSLRLSCAASGFTFSSYAMSWVRQAPGKGLEWVSAISGSGGSTYYADSVKGRFTISRDNSKNTLYLQMNSLRAEDTAVYYCAKIGLGLGGLLRRYFDYWGQGTLVTVSS

SEQ ID NO: 113 - protein, 122 aa, Homo sapiens
QVQLVESGGGLLKPGETLSLSCAASGFTFSDYYWSWIRQAPGKGLEWIAVINHSGSTIYYPYPVKGVFIFSRDTANNFSLKLMNMMTSDTAVYYCGTRIMITWYSRRGMDGWGKGVTVTVSS

SEQ ID NO: 114 - protein, 132 aa, Homo sapiens
EVQLVESGAEVKKPGASVKVSCKASGYTFTSYYIHWVRQAPGQGLEWMGVINPSGGSTTYAQKFQGRVTVTRDTSTSTVYMELSSLRSEDTAVYYCARERGDSSGYYEIITTANRRFGMDVWGQGTTVTVSS

SEQ ID NO: 115 - protein, 124 aa, Homo sapiens
EVQLVESGAEVKKPGSSVKVSCKASGGTFSSFAISWVRQAPGQGLEWMGGIIPIFDTTNYAQKFQGRVTITADESTRTAYMELSSLRSEDTAVYYCARIPGWDRGTDRNWNDDWGQGTTVTVSS

SEQ ID NO: 116 - protein, 122 aa, Homo sapiens
EVQLVESGAEVKKPGSSVKVSCKASGGTFSSYAISWVRQAPGQGLEWMGGIIPIFGTANYAQKFQGRVTVTADESTSTAYMELSSLRSEDTAVYYCARTYSFDSSGYYYDYWGQGTMVTVSS

SEQ ID NO: 117 - protein, 124 aa, Homo sapiens
QVQLVESGGGVVLPGRSLRLSCAASGFTFSTFAMHWVRQAPGKGLEWVAVISDEGSNKYYADSVKGRFTISRDNSRNTLYLQMNSLRAEDTAVYYCARAFYDSNWSVGSYFDSWGQGTPVTVSS

SEQ ID NO: 118 - protein, 125 aa, Homo sapiens
EVQLLQSGGDLIQPGRSLRLSCAASGFSFEDYAMHWVRQAPGQGLEWVSGISYNGGSIDYVDSVKGRFTISRDNAKNALYLEMNSLRPEDTAFYYCAKDSVRREYTHARVPFDNWGLGTLVTVSS

SEQ ID NO: 119 - protein, 124 aa, Homo sapiens
EVQLLESGGGVVQPGRSLRLSCVASGFNFNNYGMHWVRQAPGKGLEWLAALSYEGSKEHYADSLKGRFTVSRDYSRATLHLHMNSLEPEDTAVYFCAKSSKIFYLGESREVDYWGRGTLVTVSS

SEQ ID NO: 120 - protein, 128 aa, Homo sapiens
EVQLVESGAEVKKPGASVKVSCKVSGYTLTELSMHWVRQAPGKGLEWMGGFDPEDGETMYAQKFQGRVTMTEDTSTDTAYMELSSLRSEDTAVYYCATSTAVAGTPDLFDYYYGMDVWGQGTTVTVSS

SEQ ID NO: 121 - protein, 126 aa, Homo sapiens
EVQLVESGGGLVQPGGSLRLSCAASGFTFSSYWMSWVRQAPGKGLEWVANINQDGSEKYYVDSVKGRFTISRDNAKNSLYLQVNSLRAEDTAVYYCARDWDYDILTGSWFGAFDIWGQGTTVTVSS

SEQ ID NO: 122 - protein, 120 aa, Homo sapiens
EVQLLESGGGLVQPGGSLRLSCTASGFTFSSYWMSWVRQAPGKGLEWVANIQQDGSEKYYVDSVKGRFTISRDNAKNSLYLQMNSLRAEDTAVYYCARPTIGYSYGSDYWGQGTTVTVSS

SEQ ID NO: 123 - protein, 125 aa, Homo sapiens
EVQLLESGGGVVQPGRSLRLSCVVSGFTFNNYGMHWVRQAPGKGLEWVAVISYEGSVKYYGDHVDGRFTISRDPFKNTLYLHMNNLRPDDTAVYYCAKVSAIFWLGQGLSPIDVWGQGTTVTVSS

SEQ ID NO: 124 - protein, 115 aa, Homo sapiens
EVQLVESGGGLVQPGGSLRLSCAASGFIVSSNYMSWVRQAPGKGLEWVSVIYSGGSTYYADSVKGRFTISRHNSKNTLYLQMNSLRAEDTAVYYCAREAYGMDVWGQGTTVTVSS

SEQ ID NO: 125 - protein, 118 aa, Homo sapiens
EVQLVESGGGLIQPGGSLRLSCAASGITVSSNYMSWVRQAPGKGLEWVSVIYSGGSTDYADSVKGRFTISRDKSKNTLYLQMNSLRAEDTAVYYCARDLGEAGGMDVWGQGTTVTVSS

SEQ ID NO: 126 - protein, 117 aa, Homo sapiens
EVQLVESGGGLIQPGGSLRLSCAASGIIVSSNYMTWVRQAPGKGLEWVSVIYSGGSTFYADSVKGRFTISRDNSKNTLYLQMSSLRAEDTAVYYCARDLGPYGMDVWGQGTTVTVSS

SEQ ID NO: 127 - protein, 117 aa, Homo sapiens
EVQLVESGGGLIQPGGSLRLSCAASEFIVSRNYMSWVRQAPGKGLEWVSVIYSGGSTYYADSVKGRFTISRDNSKNTLNLQMNSLRAEDTAVYYCARDYGDYYFDYWGQGTLVTVSS

SEQ ID NO: 128 - protein, 126 aa, Homo sapiens
QVQLVQSGSELKKPGASVKVSCKASGYTFTSYAMNWVRQAPGQGLEWMGWINTNTGNPTYAQGFTGRFVFSLDTSVSTAYLQISSLKAEDTAVYYCARPQGGSSWYRDYYYGMDVWGQGTTVTVSS

SEQ ID NO: 129 - protein, 124 aa, Homo sapiens
EVQLVESGGGVVQPGRSLRLSCAASGFTFSIYGMHWVRQAPGKGLEWVAVISYDGSNKYYADSVKGRFTISRDNSKNTLYLQMNSLRAEDTAVYYCAKEGRPSDIVVVVAFDYWGQGTLVTVSS

SEQ ID NO: 130 - protein, 117 aa, Homo sapiens
EVQLVESGGGLIQPGGSLRLSCAASGFTVSSNYMSWVRQAPGKGLEWVSVIYSGGSTYYADSVKGRFTISRDNSKNTLYLQMNSLRAGDTAVYYCARDYGDFYFDYWGQGTLVTVSS

SEQ ID NO: 131 - protein, 128 aa, Homo sapiens
QVQLVQSGAEVKKPGASVKVSCKASGYTFTGYYMHWVRQAPGQGLEWMGWINPISGGTNYAQKFQGRVTMTRDTSISTAYMELSRLRSDDTAVYYCASPASRGYSGYDHGYYYYMDVWGKGTTVTVSS

SEQ ID NO: 132 - protein, 123 aa, Homo sapiens
QVQLVQSGPEVKKPGTSVKVSCKASGFTFTSSAVQWVRQARGQRLEWIGWIVVGSGNTNYAQKFQERVTITRDMSTSTAYMELSSLRSEDTAVYYCAAPHCSGGSCLDAFDIWGQGTMVTVSS

SEQ ID NO: 133 - protein, 125 aa, Homo sapiens
QVQLVESGGGLVKPGGSLRLSCAASGFIFSDYCMSWIRRAPGKGLEWLSYISNSGTTRYYADSVKGRFTISRDNGRNSLYLQMDSLSAEDTAVYYCARRGDGSSSIYYYNYMDVWGKGTTVTVSS

SEQ ID NO: 134 - protein, 120 aa, Homo sapiens
EVQLVESGGGVVQPGRSLRLSCAASGFTFSSYGMHWVRQAPGKGLEWVTVISYDGRNKYYADSVKGRFTISRDNSKNTLYLQMNSLRAEDTAVYYCAREFGDPEWYFDYWGQGTLVTVSS

SEQ ID NO: 135 - protein, 122 aa, Homo sapiens
QVQLVQSGAEVKKPGASVKVSCMASGYTFTGYYMHWVRQAPGQGLEWMGWINPNSGGTNYAQKFQGRVTMTRDTSISTAYMELSRLRSDDTAVYYCARDSPFSALGASNDYWGQGTLVTVSS

SEQ ID NO: 136 - protein, 123 aa, Homo sapiens
EVQLVESGGGVVQPGRSLRLSCAASGFTFSSYAMHWVRQAPAKGLEWVAVILYDGSGKYYADSVKGRFTISRDNSKNTLYLQMNSLRAEDTAVYYCARDGIVDTALVTWFDYWGQGTLVTVSS

SEQ ID NO: 137 - protein, 138 aa, Homo sapiens
QVQLVQSGAEVKKPGSSVKVSCKASGGTFSSYAISWVRQAPGQGLEWMGGIIPIFGTANYAQKFQGRVTITADESTSTAYMELSSLRSEDTAVYYCARGNRLLYCSSTSCYLDAVRQGYYYYYYMDVWGKGTTVTVSS

SEQ ID NO: 138 - protein, 127 aa, Homo sapiens
EVQLVESGGGVVQPGRSLRLSCAASGFTFSRYGMHWVRQAPGKGLEWVAVISYDGSNKYYADSVKGRFTISRDNSKNTLYLQMNSLRAEDTAVYYCAKVTAPYCSGGSCYGGNFDYWGQGTLVTVSS

SEQ ID NO: 139 - protein, 126 aa, Homo sapiens
EVQLVESGGGLVQPGRSLRLSCAASGFTFDDYAMHWVRQAPGKGLEWVSGISWNSGTIGYADSVKGRFTISRDNAKNSLYLQMNSLRAEDTAFYYCAKAGVRGIAAAGPDLNFDHWGQGTLVTVSS

SEQ ID NO: 140 - protein, 121 aa, Homo sapiens
EVQLVESGGGVVQPGRSLRLSCAASGFTFSNYAIHWVRQAPGKGLEWVAVISYDGSNKYYADSVKGRFTISRDNSKNTLYLQMNSLRAEDTAVYYCARDFDDSSFWAFDYWGQGTLVTVSS

SEQ ID NO: 141 - protein, 120 aa, Homo sapiens
QVQLVQSGAEVKKPGASVKVSCKASGYTFTSYYMHWVRQAPGQGLEWMGIINPSGGSTSYAQKFQGRVTMTRDTSTSTVYMELSSLRSEDTAVYYCARVPREGTPGFDPWGQGTLVTVSS

SEQ ID NO: 142 - protein, 123 aa, Homo sapiens
QVQLQESGPGLVKPSQTLSLTCTVSGGSISSGGYYWSWIRQHPGKGLEWIGYIYYSGSTYYNPSLKSRVTISVDTSKNQFSLKLSSVTAADTAVYYCARVWQYYDSSGSFDYWGQGTLVTVSS

SEQ ID NO: 143 - protein, 129 aa, Homo sapiens
QVQLQESGPGLVKPSETLSVTCTVSGGSISSSRYYWGWIRQPPGKGLEWIGSIYYSGSTYYNPSLKSRVTISVDTSKNQFSLKLSSVTAADTAVYYCARHAAAYYDRSGYYFIEYFQHWGQGTLVTVSS

SEQ ID NO: 144 - protein, 127 aa, Homo sapiens
EVQLVESGGGVVQPGRSLRLSCAASGFTFSSYGMHWVRQAPGKGLEWVAVISYDGSNKYYADSVKGRFTISRDNSKNTLYLQMNSLRAEDTAVYYCAKASGIYCSGGDCYSYYFDYWGQGTLVTVSS

SEQ ID NO: 145 - protein, 123 aa, Homo sapiens
QVQLQESGPGLVKPSQTLSLTCTVSGGSISSGGYYWSWIRQHPGKGLEWIGYIYYSGSTYYNPSLKSRVTISVDTSKNQFSLKLSSVTAADTAVYYCARTMYYYDSSGSFDYWGQGTLVTVSS

SEQ ID NO: 146 - protein, 127 aa, Homo sapiens
EVQLVESGGGVVQPGRSLRLSCAASGFTFSSYGMHWVRQAPGKGLEWVAVISYDGSNKYYADSVKGRFTISRDNSKNTLYLQMNSLRAEDTAVYYCAKASGIYCSGGNCYSYYFDYWGQGTLVTVSS

SEQ ID NO: 147 - protein, 123 aa, Homo sapiens
EVQLVESGGGLVQPGGSLRLSCAASGFTFSSYDMHWVRQATGKGLEWVSAIGTAGDTYYPGSVKGRFTISRENAKNSLYLQMNSLRAGDTAVYYCARVGYDSSGYSGWYFDLWGRGTLVTVSS

SEQ ID NO: 148 - protein, 117 aa, Homo sapiens
QVQLVESGGGLIQPGGSLRLSCAASGFIVSSNYMSWVRQAPGKGLEWVSVIYSGGSTFYTDSVKGRFTISRDNSKNTLYLQMNSLRAEDTAVYYCVRDYGDFYFDYWGQGTLVTVSS

SEQ ID NO: 149 - protein, 117 aa, Homo sapiens
QVQLVESGGGLIQPGGSLRLSCAASGFIVSSNYMSWVRQAPGKGLEWVSVIYSGGSTFYADSVKGRFTISRDNSKNTLYLQMNSLRAEDTAVYYCARDYGDYYFDYWGQGTLVTVSS

SEQ ID NO: 150 - protein, 123 aa, Homo sapiens
QVQLQQWGAGLLKPSETLSLTCAVSGGSLSGFYWTWIRQPPGKGLEWIGETNHFGSTGYKPSLKSRVTISVDMSRNQFSLKVTSVTAADTAVYYCARKPLLYSDFSPGAFDIWGQGTMVTVSS

SEQ ID NO: 151 - protein, 123 aa, Homo sapiens
QVQLQQWGAGLLKPSETLSLSCAVYGGSLSGYYWSWIRQPPGKGLEWIGEINHFGSTGYNPSLKSRVTISVDTSKSQFSVKLSSVTAADTAVYYCARKPLLYSNLSPGAFDIWGQGTMVTVSS

SEQ ID NO: 152 - protein, 118 aa, Homo sapiens
QVQLVESGGGLIQPGGSLRLSCAASGFTVSSNYMSWVRQAPGKGLEWVSVIYSGGSTYYADSVKGRFTISRDNSKNTLYLQMNSLRAEDTAVYYCARGEGWELPYDYWGQGTLVTVSS

SEQ ID NO: 153 - protein, 132 aa, Homo sapiens
QLQLQESGPGLVKPSETLSLTCTVSGASVSSGSYYWSWIRQPPGKGLEWIGYIYYSGSTNYNPSLKSRVTISVDTSKNQFSLKLSSVTAADTAVYYCARERPGGTYSNTWYTPTDTNWFDTWGQGTLVTVSS

SEQ ID NO: 154 - protein, 122 aa, Homo sapiens
QVQLVQSGAEVKKPGASVRVSCKASGYTFTSYGFSWVRQAPGQGLEWMGWISAYNGNTNFAQKLQGRVTMTTDTSTSTAYMELRSLRSDDTAVYYCARGEAVAGTTGFFDYWGQGTLVTVSS

SEQ ID NO: 155 - protein, 120 aa, Homo sapiens
QVQLQESGPGLVKPSGTLSLTCAVSGGSISSTNWWSWVRQPPGKGLEWIGEIYHTGSTNYNPSLKSRVTISVDKSKNQFSLKLSSVTAADTAVYYCVRDGGRPGDAFDIWGQGTMVTVSS

SEQ ID NO: 156 - protein, 119 aa, Homo sapiens
EVQLVESGGGLVQPGGSLRLSCAASGFTFSSYWMSWVRQAPGKGLEWVANIKQDGSEKYYVDSVKGRFTISGDNAKNSLYLHMNSLRAEDTAVYYCAIQLWLRGGYDYWGQGTLVTVSS

SEQ ID NO: 157 - protein, 128 aa, Homo sapiens
QVQLQQSGAEVKKPGESLKISCKGSGYSFTSYWIGWVRQMPGKGLEWMGIIYPGDSDTRYSPSFQGQVTISADKSISTAYMQWSSLKASDTAMYYCARSFRDDPRIAVAGPADAFDIWGQGTMVTVSS

SEQ ID NO: 158 - protein, 127 aa, Homo sapiens
QLQLQESGPGLVKPSETLSLTCTVSGGSISSYYWSWIRQPPGKGLEWIGYIYYSGSTNYNPSLKSRVTISVDTSKNQFSLKLSSVTAADTAVYYCARVEDWGYCSSTNCYSGAFDIWGQGTMVTVSS

SEQ ID NO: 159 - protein, 121 aa, Homo sapiens
QVQLVESGGGVVQPGRSLRLSCAASGFTFSSHAMHWVRQAPGKGLEWVAVISYDGSNKYYADSVKGRFTISRDNSKNTLYLQMNSLRAEDTAVYYCAREDYYDSSGSFDYWGQGTLVTVSS

SEQ ID NO: 160 - protein, 125 aa, Homo sapiens
QVQLVESGGGVVQPGRSLRLSCAASGFTFSNFGMHWVRQAPGKGLEWVAVIWYDGSNKYYADSVKGRFTISRDNSKNTLYLQMNSLRAEDTAVYYCARGVNPDDILTGVDAFDIWGQGTMVTVSS

SEQ ID NO: 161 - protein, 117 aa, Homo sapiens
QVQLVESGGGLIQPGGSLKLSCVVSGFTVSKNYISWVRQAPGKGLEWVSVIFAGGSTFYADSVKGRFAISRDNSNNTLFLQMNSLRVEDTAIYYCARGDGELFFDQWGQGTLVTVSS

SEQ ID NO: 162 - protein, 120 aa, Homo sapiens
QVQLVESGGGLIKPGRSLRLSCTASGFTFGDYAMTWFRQAPGKGLEWVGFIRSKAYGGTTGYAASVKYRFTISRDDSKSIAYLQMDSLKTEDTAVYYCTRWDGWSQHDYWGQGTLVTVSS

SEQ ID NO: 163 - protein, 118 aa, Homo sapiens
QVQLVESGGGVVQPGRSLRLSCAASGFTYSTYAMHWVRQAPGKGLEWVAFISYDGSNKYYADSVKGRFTISRDNSKNTLYLQMNSLRAEDTAVYYCARDFYHNWFDPWGQGTLVTVSS

SEQ ID NO: 164 - protein, 127 aa, Homo sapiens
QVQLVESGGGVVQPGRSLRLSCAASGFTFSTYAMHWVRQAPGEGLEWVAVISYDGSNTYYADSVKGRFTISRDNSKNTLYLQMNSLRAEDTAVYYCARDPIWFGELLSPPFVHFDYWGQGTLVTVSS

SEQ ID NO: 165 - protein, 127 aa, Homo sapiens
QVQLVESGGGVVQPGRSLRLSCAASGFTFSNYAMHWVRQAPGKGLEWVAVISYDGSNKYYADSVKGRFTISRDNSKNTLYLQMNSLRAEDTAIYYCASGYTGYDYFVRGDYYGLDVWGQGTTVTVSS

SEQ ID NO: 166 - protein, 127 aa, Homo sapiens
QVQLVQSGAEVKKPGASVKVSCKASGYTFTSYYMHWVRQAPGQGLEWMGIINPSGGSTSYAQKLQGRVTMTRDTSTSTVYMELSSLRSEDTAVYYCARANHETTMDTYYYYYYMDVWGKGTTVTVSS

SEQ ID NO: 167 - protein, 118 aa, Homo sapiens
EVQLVESGGGLIQPGGSLRLSCAASGFTVSSNYMTWVRQAPGKGLEWVSLIYPGGSTYYADSVKGRFTISRDNSKNTLYLQMNSLRAEDTAVYYCAREGMGMAAAGTWGQGTLVTVSS

SEQ ID NO: 168 - protein, 129 aa, Homo sapiens
QVQLVQSGAEVKKPGASVKVSCKASGYTFTGYYMHWVRQAPGQGLEWMGWISPVSGGTNYAQKFQGRVTMTRDTSISTAYMELSRLRSDDTAVYYCARAPLFPTGVLAGDYYYYGMDVWGQGTTVTVSS

SEQ ID NO: 169 - protein, 119 aa, Homo sapiens
EVQLVESGGGLIQPGGSLRLSCAASGLTVSSNYMSWVRQAPGKGLEWVSVLYSGGSSFYADSVKGRFTISRDNSKNTLYLQMNSLRAEDTAVYYCARESGDTTMAFDYWGQGTLVTVSS

SEQ ID NO: 170 - protein, 116 aa, Homo sapiens
EVQLVESGGGLIQPGGSLRLSCAASGVTVSRNYMSWVRQAPGKGLEWVSVIYSGGSTYYADSVKGRFTISRDNSKNTLYLQMNSLRAEDTAVYYCARDLSAAFDIWGQGTMVTVSS

SEQ ID NO: 171 - protein, 125 aa, Homo sapiens
EVQLVESGGGLVQPGGSLRLSCAASGFTFSGYSMNWVRQAPGKGPEWVSYISRSSSTIYYADSVKGRFTISRDNAKNSLYLQMNSLRDEDTAVYYCAREGARVGATYDTYYFDYWGQGTLVTVSS

SEQ ID NO: 172 - protein, 123 aa, Homo sapiens
QVQLVQSGPEVKKPGTSVKVSCKASGFTFTSSAVQWVRQARGQRLEWIGWIVVGSGNTNYAQKFQERVTITRDMSTSTAYMELSSLRSEDTAVYYCAAPYCSGGSCSDAFDIWGQGTMVTVSS

SEQ ID NO: 173 - protein, 118 aa, Homo sapiens
QVQLQESGPGLVKPSETLSLSCAVSGGSIGSYFWSWIRQPPGKGLEWIGYLHYSGSTNYNPSLKSRVTISVDTSKNQFSLKLSSVTAADTAVYYCARLQWLRGAFDIWGQGTMVTVSS

SEQ ID NO: 174 - protein, 125 aa, Homo sapiens
QVQLVQSGAEVKKPGASVKVSCKASGYTFTGYYMHWVRQAPGQGLEWMGWINPNSGGTNYAQKFQGRVTMTRDTSISTAYMELSRLRSDDTAVYYCATAHPRRIQGVFFLGPGVWGQGTTVTVSS

SEQ ID NO: 175 - protein, 125 aa, Homo sapiens
EVQLLESGGGLVQPGGSLRLSCAASGFTFSTYAMSWVRQAPGKGLEWVSTITGSGRDTYYADSVKGRFTISRDNSKNTLFLQLNSLRAEDAAVYSCANHPLASGDDYYHYYMDVWGKGTTVTVSS

SEQ ID NO: 176 - protein, 120 aa, Homo sapiens
QVQLVQSGAEVKKPGASVKVSCKASGYTFTNYYMHWVRQAPGQGLEWMGIINPSGGSTGYAQKFQGRVTMTRDTSTSTVYMELSSLRSEDTAVYYCARSRPTPDWYFDLWGRGTLVTVSS

SEQ ID NO: 177 - protein, 122 aa, Homo sapiens
QVQLVQSGSEVKKPGSSVKVSCKASGGTFSSYAFSWVRQAPGQGLEWMGRIIPILALANYAQKFQGRVTITADKSTSTAYMELSSLRSEDTAVYYCARVNQAVTTPFSMDVWGQGTTVTVSS

SEQ ID NO: 178 - protein, 122 aa, Homo sapiens
QVQLQESGPGLVKPSGTLSLTCAVSGGSISSNNWWSCVRQPPGKGLEWIGEIYHSGSTNYNPSLKSRVTISVDKSKNQFSLKLSSVTAADTAVYYCARGGDTAMGPEYFDYWGQGTLVTVSS

SEQ ID NO: 179 - protein, 123 aa, Homo sapiens
QVQLVESGGGVVQPGRSLRLSCAASGFTFSSYAMHWVRQAPGKGLEWVAVILYDGSNKYYADSVKGRFTISRDNSKNTLYLQMNSLRAEDTAVYYCARDSDVDTSMVTWFDYWGQGTLVTVSS

SEQ ID NO: 180 - protein, 123 aa, Homo sapiens
EVQLLESGGGLVQPGGSLRLSCAASGFTFSNYAMSWVRQAPGKGLEWVSAISGSDGSTYYAGSVKGRFTISRDNSKNTLYLQMNSLRAEDTAVYYCAKDPLITGPTYQYFHYWGQGTLVTVSS

SEQ ID NO: 181 - protein, 119 aa, Homo sapiens
QVQLVESGGGVVQPGRSLRLSCAASGFTFSSYAMHWVRQAPGKGLEWVAVIPFDGRNKYYADSVTGRFTISRDNSKNTLYLQMNSLRAEDTAVYYCASSSGYLFHSDYWGQGTLVTVSS

SEQ ID NO: 182 - protein, 119 aa, Homo sapiens
EVQLVESGGGLVQPGGSLRLSCAASGFTFSTYWMSWVRQPPGKGLEWVANIKQDGSEKYYVDSVKGRFTISRDNAKNSLYLQMNSLRADDTAVYYCAGGTWLRSSFDYWGQGTLVTVSS

SEQ ID NO: 183 - protein, 121 aa, Homo sapiens
EVQLVESGGGVVQPGRSLRLSCAASGFTFSSYAMHWVRQAPGKGLEWVAVISYDGSNKYSADSVKGRFTISRDNSKNTLYLQMNSLRAEDTAVYYCAKGGAYSYYYYMDVWGKGTTVTVSS

SEQ ID NO: 184 - protein, 117 aa, Homo sapiens
EVQLVESGGGLVQPGGSLRLSCAASGVTVSSNYMSWVRQAPGKGLEWVSLIYSGGSTFYADSVKGRFTISRDNSENTLYLQMNTLRAEDTAVYYCARDLYYYGMDVWGQGTTVTVSS

SEQ ID NO: 185 - protein, 124 aa, Homo sapiens
EVQLVESGGGVVQPGRSLRLSCAASGFTFSSYAMFWVRQAPGKGLEWVAVISYDGSNKYYADSVKGRFTISRDNSKNTLYLQMNSLRAEDTAVYYCARADLGYCTNGVCYVDYWGQGTLVTVSS

SEQ ID NO: 186 - protein, 129 aa, Homo sapiens [sequence omitted]

SEQ ID NO: 187 - protein, 131 aa, Homo sapiens
EVQLVESGGGLIQPGGSLRLSCAASGFTVSNNYMSWVRQAPGKGLEWVSVIYSGGSTYYADSVKGRFTISRDKSKNTLYLQMNRLRAEDTAVYYCAREGEVEGYNDFWSGYSRDRYYFDYWGQGTLVTVSS

SEQ ID NO: 188 - protein, 131 aa, Homo sapiens
EVQLVESGGGLIQPGGSLRLSCAASGFSVSSNYMSWVRQAPGKGLEWVSVIYSGGSTYYADSVKGRFTISRDNSKNTLYLQMNSLRAEDTAVYYCAREGEVEGYYDFWSGYSRDRYYFDYWGQGTLVTVSS

SEQ ID NO: 189 - protein, 120 aa, Homo sapiens
EVQLVESGGGLVKPGGSLRLSCAASGLTFTAYRMNWVRQAPGKGLEWLSSISNTNGDIYYADSVKGRFTISRDNAKNSLYLQMNSLRADDTAVYYCARDVASNYAYFDLWGQGTLVTVSS

SEQ ID NO: 190 - protein, 120 aa, Homo sapiens
EVQLVQSGAEVKKPGESLKISCKGSGYRFTNYWIGWVRQMPGKGLEWMGIIYPGDSDTRYSPSFQGQVTISADKSITTAYLQWSSLKASDTAMYYCARLSDRWYSPFDPWGQGTLVTVSS

SEQ ID NO: 191 - protein, 115 aa, Homo sapiens
EVQLVESGGGLVQPGGSQRLSCAASGFTVSSNYMSWIRQAPGKGLEWVSVIYSGGSAYYVDSVKGRFTISRDNSKNTLYLQMNSLRPEDTAVYYCARIANYMDVWGKGTTVTVSS

SEQ ID NO: 192 - protein, 127 aa, Homo sapiens
EVQLVESGGGLVQPGGSLRLSCVASGFTFSSYWMHWVRQVPGKGPVWVSHINSEGSSTNYADSVRGRFTISRDNAKDTLYLQMNNLRAEDTAVYYCARPTAVAAAGNYFYYYGMDVWGQGTTVTVSS

SEQ ID NO: 193 - protein, 122 aa, Homo sapiens
EVQLVESGGGLVKPGGSLRLSCAASGFTFSSYNMNWVRQAPGKGLEWVSCISSSSSYIYYADSVKGRFTISRDNAKNSLYLQMNSLRAEDTAVYYCARERGYDGGKTPPFLGGQGTLVTVSS

SEQ ID NO: 194 - protein, 122 aa, Homo sapiens
EVQLVESGGGLIQPGGSLRLSCAASGFTVSSNYMSWVRQAPGKGLEWVSVIYSGYSTYYVDSVKGRFTISRDNSKNTLYLQMNSLRAEDTAVYYCARVGGAHSGYDGSFDYWGQGTLVTVSS

SEQ ID NO: 195 - protein, 127 aa, Homo sapiens
QVQLVESGGGVVQPGRSLRLSCAASGFTFSRYGMHWVRQAPGKGLEWVAVMSYDGSSKYYADSVKGRFTISRDNSKNTLCLQMNSLRAEDTAVYYCAKQAGPYCSGGSCYSAPFDYWGQGTLVTVSS

SEQ ID NO: 196 - protein, 117 aa, Homo sapiens
EVQLVESGGGLIQPGGSLRLSCAASGFIVSSNYMSWVRQAPGKGLEWVSVIYSGGSTFYADSVKGRFTISRDNSKNTLYLQMNSLRAEDTAVYYCARDFGEFYFDYWGQGTLVTVSS

SEQ ID NO: 197 - protein, 124 aa, Homo sapiens
QVQLVESGGGVVQPGRSLRLSCAASGFTFSNYGMHWVRQAPGKGLEWVAVISYDGNNKYYADSVKGRFTISRDNSKNTLYLQMNSLRAEDTAVYYCAKDPFPLAVAGTGYFDYWGQGTLVTVSS

SEQ ID NO: 198 - protein, 129 aa, Homo sapiens [sequence omitted]

SEQ ID NO: 199 - protein, 122 aa, Homo sapiens
QVQLVQSGAEVKKPGSSVKVSCKASGGTFSSYAINWVRQAPGQGLEWMGRIIPIVGIANYAQKFQGRVTITADKSSSTAYMELSSLRSEDTAVYYCARDLLDPQLDDAFDIWGQGTMVTVSS

SEQ ID NO: 200 - protein, 121 aa, Homo sapiens
EVQLVESGGGLVQPGRSLRLSCAASGFTFDDYAMHWVRQAPGKGLEWVSGISWNSGSIGYADSVKGRFTISRDNAKNSLYLQMNSLRAEDTALYYCVKGVEYSSSSNFDYWGQGTLVTVSS

SEQ ID NO: 201 - protein, 117 aa, Homo sapiens
EVQLVESGGGLVQPGGSLRLSCAASGFTVSSNYMSWVRQAPGKGLEWVSLIYSGGSTYYADSVKGRFTISRDNSKNTLYLQMNSLRAEDTAVYYCARDTLGRGGDYWGQGTLVTVSS

SEQ ID NO: 202 - protein, 126 aa, Homo sapiens
EVQLLESGGGLEQPGGSLRLSCAASGFTFSTYAMSWVRQAPGKGLEWVSAISGSGAGTFYADSVKGRFTISRDNSKNTLYLQMNSLRAEDTAVYYCARESDCGSTSCYQVGWFDPWGQGTLVTVSS

SEQ ID NO: 203 - protein, 124 aa, Homo sapiens
QVQLVQSGAEVKKPGASVKVSCKASGHTFTSYYMHWVRQAPGQGLEWMGIINPSGGSTSYAQKFQGRVTMTRDTSTSTVYMELSSLRSEDTAVYYCARGPERGIVGATDYFDYWGQGTLVTVSS

SEQ ID NO: 204 - protein, 121 aa, Homo sapiens
EVQLLESGGGLVQPGGSLRLSCAASGFTFSSYAMSWVRQAPGKGLEWVSAISGSGGSTYYADSVKGRFTISRDNSKNTLYLQMNSLRAEDTAVYYCAKEPIGQPLLWWDYWGQGTLVTVSS

SEQ ID NO: 205 - protein, 119 aa, Homo sapiens
EVQLVQSGAEVKKPGESLKISCKGSGYSFTSYWIGWVRQMPGKGLEWMGIIYPGDSDTRYSPSFQGQVTISADKSISTAYLKWSSLKASDSAMYYCARGPNLQNWFDPWGQGTLVTVSS

SEQ ID NO: 206 - protein, 117 aa, Homo sapiens
EVQLVESGGGLIQPGGSLRLSCAASGFTVSSNYMSWVRQAPGKGLEWVSVIYSGGSTFYADSVKGRFTFSRDNSKNTLYLQMNSLRAEDTAVYYCARDLMAYGMDVWGQGTTVTVSS

SEQ ID NO: 207 - protein, 117 aa, Homo sapiens
EVQLVESGGGLVQPGGSLRLSCAASEFTVSSNYMSWVRQAPGKGLEWVSVIYSGGSTFYADSVKGRFTISRDNSKNTLYLQMNSLRPEDTAVYYCARDYGDFYFDFWGQGTLVTVSS

SEQ ID NO: 208 - protein, 120 aa, Homo sapiens
QVQLVQSGAEVKKPGASVKVSCKASGYTVTGYYIHWVRQAPGQGLEWMGWISPNSGGTNYAQKFQGWVTMTRDMSITTAYMELSRLRSDDTAVYYCARERYFDLGGMDVWGQGTTVTVSS

SEQ ID NO: 209 - protein, 120 aa, Homo sapiens
QVQLVESGGGVVQPGRSLRLSCAASGFTFSSYGMHWVRQAPGKGLEWVAAIWYDGSNKHYADSVKGRFTISRDNSKNTLYLQMNSLRAEDTAVYYCARDVGRVTTWFDPWGQGTLVTVSS

SEQ ID NO: 210 - protein, 122 aa, Homo sapiens
EVQLLESGGGLVQPGGSLRLSCAASGFTFSSYAMSWVRQAPGKGLEWVSAITDSGDGTFYADSVKGRFTISRDNSKNTLYLQMNSLRAEDTAVYYCASEEDYSNYVGWFDPWGQGTLVTVSS

SEQ ID NO: 211 - protein, 122 aa, Homo sapiens
EVQLVESGGGLVQPGGSLRLSCAASGFTFSSYDMHWVRQATGKGLEWVSAIGTAGDTYYPDSVKGRFTISRENAKNSLYLQMNSLRAGDTAVYYCARDRGSSGWYGWYFDLWGRGTLVTVSS

SEQ ID NO: 212 - protein, 130 aa, Homo sapiens
EVQLVQSGAEVKKPGASVKVSCKASGYTFTSYGISWVRQAPGQGLEWMGWISAYNGNTNYAQKLQGRVTMTTDTSTSTAYMELRSLRSDDTAVYYCAREGYCSGGSCYSGYYYYYGMDVWGQGTTVTVSS

SEQ ID NO: 213 - protein, 119 aa, Homo sapiens
EVQLVESGGGLVQPGGSLRLSCAASGFTVSSNYMSWVRQAPGKGLEWVSVIYSGGSTFYADSVKGRFTISRDNSMNTLFLQMNSLRAEDTAVYYCARVLPMYGDYLDYWGQGTLVTVSS

SEQ ID NO: 214 - protein, 117 aa, Homo sapiens
EVQLVESGGGLIQPGGSLRLSCAASGLTVSSNYMSWVRQAPGKGLEWVSVIYSGGSTFYADSVKGRFTISRDNSKNTLYLQMNSLRAEDTAVYYCARDLDVYGLDVWGQGTTVTVSS

SEQ ID NO: 215 - protein, 120 aa, Homo sapiens
QVQLVQSGAEVKKPGASVKVSCKASGYIYSGYFMHWVRQAPGQGLEWMGWISPDSGGANYAQTFQGRVTMTRDTSTTTAHMELSRLRSDDTAVYYCARGPRYSGTHFDYWGQGTLVTVSS

SEQ ID NO: 216 - protein, 120 aa, Homo sapiens
QVQLVQSGAEVKKPGASVKVSCKASGYIFSGYYTHWVRQAPGQGLEWMGWISPDSGGTNYAQKFQGRVTMTRDTSITTAYVELSGLRSDDTAVYYCARGPRYSGTYFDYWGQGTLVTVSS

SEQ ID NO: 217 - protein, 120 aa, Homo sapiens
QVQLVQSGAEVKKPGASVKVSCKASGYIYSGYYMHWVRQAPGQGLEWMGWISPDSGGTNYAQRFQGRVTMTRDTSTTTAYMELSRLRSDDTAVYYCARGPRYSGTYFDYWGQGTLVTVSS

SEQ ID NO: 218 - protein, 123 aa, Homo sapiens
EVQLVESGGGLIQPGGSLRLSCAASGFTVSSNYMSWVRQAPGKGLEWVSVIYSGGSTYYADSVKGRFTISRDNSKNTLYLQMNSLRAEDTAVYYCARDPYGYSSIWDGQGGHWGQGTLVTVSS

SEQ ID NO: 219 - protein, 133 aa, Homo sapiens
QVQLVESGGGLVKPGGSLRLSCAASGFTFNYYSMNWVRQAPGKGLEWISSISTSSSFVYYADSVKGRFTISRDNAKTSLYLQMNSLRAEDTAVYFCARGGYCSDGSCYVQDRLIYYYSGLDVWGQGTTVTVSS

SEQ ID NO: 220 - protein, 129 aa, Homo sapiens
EVQLVESGGGLVQPGGSLRLSCAASGFTFSTYEMNWVRQAPGKGLEWVSYISSSGSTIYYADSVKGRFTISRDNAKNSLYLQMSSLRAEDTAIYYCARDRRRRYCTNGVCYRPEEIDYWGQGTLVTVSS

SEQ ID NO: 221 - protein, 124 aa, Homo sapiens
QVQLVESGGGVVQPGRSLRLSCAASGFTFSSYGMHWVRQAPGKGLEWVALIWYDGSNKNYADSVKGRFTISRDNSKNTLDLQMNSLRAEDTAVYYCARDPFPGAVAGTGYLQYWGQGTLVTVSS

SEQ ID NO: 222 - protein, 123 aa, Homo sapiens
EVQLVESGGGVVQPGRSLRLSCAASGFTFRNYGMHWVRQAPGKGLEGVAVISYDGSNKYYADSVKGRFTISRDNSKNTLYLQMNSLRAEDTAVYYCAKSSGSYYYYYYGMDVWGQGTTVTVSS

SEQ ID NO: 223 - protein, 120 aa, Homo sapiens
EVQLVQSGAEVKKPGASVKVSCKASGYTFTSYYMHWVRQAPGQGLEWMGIINPSGGSTSYAQKFQGRVTMTRDTSTSTVYMELSSLRSEDTAVYYCARLHCGGDCYLDYWGQGTLVTVSS

SEQ ID NO: 224 - protein, 127 aa, Homo sapiens
EVQLLESGGGLVQPGGSLRLSCAASGFTFSSYAMSWVRQAPGKGLEWVSAISGSGGSTYYADSVKGRFTISRDNSKNTLYLQMNSLRAEDTAVYYCAKGSGSGSYPNYYYYYGMDVWGQGTTVTVSS

SEQ ID NO: 225 - protein, 117 aa, Homo sapiens
EVQLVESGGGLIQPGGSLRLSCAASGFTVSSNYMSWVRQAPGKGLEWVSVFYSGGSTYYADSVKGRFTISRDNSKNTLYLQMNSLRAEDTAVYYCARDYGDLYFDYWGQGTLVTVSS

SEQ ID NO: 226 - protein, 134 aa, Homo sapiens
QVQLVESGGGVVQPGRSLRLSCAASGFTFSSYGMHWVRQAPGKGLEWVAVISYDGSNKYYADSVKGRFTISRDNSKNTLYLQMSSLRGEDTAVYYCAKDQAYYDILTGYLNPPKNYYYYGMDVWGQGTTVTVSS

SEQ ID NO: 227 - protein, 120 aa, Homo sapiens
QVQLVQSGAEVKKPGASVKVSCKVSGYTLTELSMHWVRQAPGKGLEWMGGFDPEDGETIYAQKFQGRVTMTEDTSTDTAYMDLSSLRSEDTAVYYCATAFSIFGVVPPDYWGQGTLVTVS

SEQ ID NO: 228 - protein, 123 aa, Homo sapiens
QVQLQESGPGLVKPSETLSLTCTVSGGSISSSSYYWGWIRQPPGKGLEWIGSIYYSGSTYYNPSLKSRVTISVDTSKNQFSLKLSSVTAADTAVYYCARQGDCSTTSCAYDYWGQGTLVTVSS

SEQ ID NO: 229 - protein, 121 aa, Homo sapiens
EVQLVESGGGVVQPGRSLRLSCSASGFTFSIYGMHWVRQAPGKGLEWVAVISYDGSNKYYADSVKGRFTISRDNSKNTLYLQMNSLRAEDTAVYYCAKDRTGNYYYGMDVWGQGTTVTVSS

SEQ ID NO: 230 - protein, 125 aa, Homo sapiens
QVQLVESGGGLVQPGGSLRLSCAASGFTFSSYAMSWVRQAPGKGLEWVSAISGSGDSTYYADSVKGRFTISRDNSKNTLYLQMNSLRAEDTAVYYCAKDRYYEFWSGYSNWFDPWGQGTLVTISS

SEQ ID NO: 231 - protein, 124 aa, Homo sapiens
EVQLVQSGAEVKKPGESLKISCKGSGYSFTSYWIGWVRQMPGKGLEWMGIIYPGDSDTRYSPSFQGQVTVSADKSISTAYLQWSSLKASDTAMYYCARVNYYDSSGYPSFHFDYWGQGTLVTVS

SEQ ID NO: 232 - protein, 124 aa, Homo sapiens
QVQLVQSGAEVKKPGASVKVSCKASGYTFIGYYMHWVRQAPGQGLEWMGWINPNSGGTNYAQKFQGRVTMTRDTSISTVYMELSRLRSDDTAVYYCAREMPAAMGYYYYGMDVWGQGTTVTVSS

SEQ ID NO: 233 - protein, 120 aa, Homo sapiens
EVQLLESGGGLVQPGGSLRLSCAASGFTFSNYAMTWVRQAPGKGLEWVSAISSGSGSTYYADSVKGRFTISRDNSKNTVYLQMNSLRAEDTAIYYCAKANKYSSSEFDFWGQGTLVTISS

SEQ ID NO: 234 - protein, 117 aa, Homo sapiens
QVQLVESGGGLIQPGGSLRLSCAASGFTVSSNYMSWVRQAPGKGLEWVSVIYSGGSTFYADSVKGRFTISRDNSKSTLYLQMNSLRVEDTAVYYCARDFGDFYFDYWGQGTLVTVSS

SEQ ID NO: 235 - protein, 126 aa, Homo sapiens
QVQLVQSGAEVKKPGASVKVSCKASGYTFTGYYMHWVRQAPGQGLEWMGWISPNSGGTNYAQKFQGWVTMTRDTSVSTAYMELSRLRFDDTAVYYCATESWVYGSGSYSSGAFDIWGQGTMVTVSS

SEQ ID NO: 236 - protein, 120 aa, Homo sapiens
EVQLVQSGAEVKKPGASVKVSCKASGYIYSGYYMHWVRQAPGQGLEWMGWISPDSGGTNYAQRFQGRVTMTRDTSTTTAYMELSRLRSDDTAMYYCARGPRYSGTYFDYWGQGTLVTVSS

SEQ ID NO: 237 - protein, 120 aa, Homo sapiens
QVQLVQSGAEVKKPGASVKVSCKASGYIFSGYYMHWVRQAPGQGLEWMGWISPDSGGTNYAQKFQGRVTMTRDTSITTGYMELSGLRSDDTAVYYCARGPRYSGTYFDYWGQGTLVTVSS

SEQ ID NO: 238 - protein, 120 aa, Homo sapiens
EVQLVQSGAEVKKPGASVKVTCKTSGYIFSGYYMHWVRQVPGQGLEWMGWISPDSGATNYAQKFQGRVTMTRDTSITTSYVELTWLKSDDTAVYYCARGPRYSGTYFDFWGQGTLVTVSS

SEQ ID NO: 239 - protein, 120 aa, Homo sapiens; identical to SEQ ID NO: 216

SEQ ID NO: 240 - protein, 120 aa, Homo sapiens
EVQLVQSGAEVKKPGASVKVSCKASGYIFSGYYMHWVRQAPGQGLEWMGWISPDSGGTNYAQNFQGRVTMTRDTSISTGYMELSRLRSDDTAMYYCARGPRYSGTYFDYWGQGVLVTVSS

SEQ ID NO: 241 - protein, 122 aa, Homo sapiens
QVQLVQSGSELKKPGASVKVSCKASGYTFATYALNWVRQAPGQGLEWMGWVNTNTGSPTYAQGFTGRFVFSFDTSVSTAYLQIRTLKAEDTAVYYCAVYYYDSGSPGWFDPWGQGTLVTVSS

SEQ ID NO: 242 - protein, 125 aa, Homo sapiens
QVQLVQSGAEVKKPGSSVKVSCKASGGTFSIYAITWVRQAPGQGLEWMGGIIPIIGTANYAQKFQGRVTITADKSTSTAYMELSSLRSEDTAVYYCARDFRYCSSTRCYFWFDPWGQGTLVTVSS

SEQ ID NO: 243 - protein, 119 aa, Homo sapiens
EVQLVQSGAEVKKPGASVKVSCMASGYTFTSYYMHWVRQAPGQGLEWMGIISPSGGGTSYAQKFQGRVTLTRDTSTSTVYMELSSLRSEDTAVYYCARWYDSTGSIDYWGQGTLVTVSS

SEQ ID NO: 244 - protein, 121 aa, Homo sapiens
EVQLVESGGGLVQPGRSLRLSCAASGFTFDDYAMHWVRQAPGKGLEWVSGISWNSGSIAFAGSVKGRFTISRDNAKNSLYLQMNSLRAEDTALYYCAKDQGYSYGNYFDYWGQGTLVTVSS

SEQ ID NO: 245 - protein, 118 aa, Homo sapiens
QVQLVQSGAEVKKPGSSVKVSCKASGGTFSSSAISWVRQAPGQGLEWMGGIIPILDITNYAQKFQGRVTITADKSTSTAFMELSSLRSEDTAVYYCALRNQWDLLVYWGQGTLVTVSS

SEQ ID NO: 246 - protein, 121 aa, Mus musculus
QVQLQQPGAELVMPGASVKMSCKASGYTFTDYWMHWVKQRPGQGLEWIGAEDTSDSYTSYNQKFKGKATLTVDESSSTAYMQLSSLTSEDSAVYYCARRGYGSSYTWFAYWGQGTLVTVSA

SEQ ID NO: 247 - protein, 122 aa, Homo sapiens
QVQLVQSGAEVKKPGSSVKVSCKASGGTFSSYAISWVRQAPGQGLEWMGGIIPIFGTANYAQKFQGRVTITADKSTSTAYMELSSLRSEDTAVYYCARVSGYDSSGYWGDYWGQGTLVTVSS

SEQ ID NO: 248 - protein, 119 aa, Homo sapiens
QVQLVQSGAEVKKPGASVKVSCKASGYTFTSYGISWVRQAPGQGLEWMGWISAYNGNTNYAQKLQGRVTMTTDTSTSTAYMELRSLRSDDTAVYYCARDGELLGWFDPWGQGTLVTVSS

SEQ ID NO: 249 - protein, 126 aa, Homo sapiens
EVQLVESGGGLVQPGRSLRLSCTASGFTFGDYAMSWFRQAPGKGLEWVGFIRSKAYGGTTEYAASVKGRFTISRDDSKSIAYLQMNSLKTEDTAVYYCTRVRRLWFGSYYYGMDVWGQGTTVTVSS

SEQ ID NO: 250 - protein, 126 aa, Homo sapiens
EVQLVESGGGLVQPGRSLRLSCTASGFTFGDYAMSWFRQAPGKGLEWVGFIRSKAYGGTTEYAASVKGRFTISRDDSKSIVYLQMNSLKTEDTAVYYCTRVRRLWFGSYYYGMDVWGQGTTVTVSS

SEQ ID NO: 251 - protein, 120 aa, Homo sapiens
QVQLVQSGAEVKNPGASVKVSCKASGYIFTNYYIHWVRQAPGQGLEWVGWIHSLSGGTSYAQKFQGRVTLTRDASIRTAYMELSRLGSDDTALYYCARASVSTITDFDYWGQGTLVAVSS

SEQ ID NO: 252 - protein, 120 aa, Homo sapiens
QVQLVQSGAEVKKPGASVKVSCKASGYIFTNYYIHWVRQAPGQGLEWVGWIHSLSGGTSYAQKFQGRVTLTRDAPIRTAYMELSGLGSDDTAVYYCARASVATITDFDYWGQGTLVAVSS

SEQ ID NO: 253 - protein, 121 aa, Homo sapiens
QVQLVESGGGVVQPGRSLRLSCAASGFTFSYYAILWFRQAPGKGLEWVAIISYDGSNKYYADSVKGRFTISRDNSKNTLYLQMNSLRPEDTAVYYCARPQSGGYYAPLDYWGQGTLVTVSS

SEQ ID NO: 254 - protein, 123 aa, Homo sapiens
QVQLVESGGGVVQPGRSLRLSCAASGFTFSRYGMHWVRQAPGKGLEWVGIISYDASDKTYAESVKGRFTISRDNSKNTLYLQMNSLRAEDTAVYYCAKVSATYYYYYYGMDVWGQGTTVTVSS

SEQ ID NO: 255 - protein, 126 aa, Homo sapiens
QVQLVESGGGVVQPGRSLRLSCAASGFTFSTYAMHWVRQAPGKGLEWVAVISYDGSNKYYADSVKGRFTISRDNPKNTLYLQMNSLRAEDTAVYYCARDTATYVLLWSGDFNLDYWGQGTLVTVSS

SEQ ID NO: 256 - protein, 121 aa, Homo sapiens
QVQLVESGGGVVQPGRSLRLSCAASGFTFSTYAMHWVRQAPGKGLEWVTLISYDGGNKYYADSVKGRFTISRDNSKNTLYLQMNSLRAEDAAVYFCARGHTGNYYYGMDVWGQGTTVTVSS

SEQ ID NO: 257 - protein, 127 aa, Homo sapiens
QVHLVESGGGVVQPGRSLRLSCAASGFTFSNYGMHWVRQAPGKGLEWVAVISGDENNKFYANSVKGRFTISRDNSKNTLSLQMNSLRPEDTARYYCAKGGDSSGWAWDGDNPPTDYWGQGTLVIVSS

SEQ ID NO: 258 - protein, 122 aa, Homo sapiens
EVQLVESGGGLVQPGRSLRLSCAASGFTFDDYAMHWVRQAPGKGLEWVSGISWNSGSIGYADSVKGRFTISRDNAKNSLYLQMNSLRTEDTALYYCAMGPFGELLPYYFDYWGQGTLVTVSS

SEQ ID NO: 259 - protein, 121 aa, Homo sapiens
QVQLVQSGAEVKKPGASVKVSCKVSGYTLTELSIHWVRQAPGKGLEWMGGFDPEDAETIYAQNFQGRVTMTEDTSTDTAYMELSSLRSEDTALYYCAAAPAVMTAGWFDPWGQGTLVSVSS

SEQ ID NO: 260 - protein, 116 aa, Homo sapiens
QVQLEESGPGLVKPSETLSLTCTVSGGSISSHYWSWIRQPPGKGLEWIGYIQDSGSTNYNPSLKSRVTISVDTSKNQFSLRLSSVTTADTAVYYCVRGAMAWFDPWGQGTLVTVSS

SEQ ID NO: 261 - protein, 121 aa, Homo sapiens
QVQLVQSGAEVKKPGASVKVSCKVSGYTLIELSIHWVRQAPGKGLEWMGGFDPEDVETIYAQKFQGRVTMTEDTSTDTAYMELSSLTSEDRAVYYCATQPAAIGGTPPYYWGQGTLVTVSS

SEQ ID NO: 262 - protein, 128 aa, Homo sapiens
QVQLVQSGAEVKKPGASVKVSCKASGYTFTSYVISWVRQAPGQGLEWMGWISAYNGNTNYAQKLQGRVTMTTDTSTSTAYMELRSLRSDDTAVYYCARDQGPTYYYGSGSPHYGMDVWGQGTTVTVSS

SEQ ID NO: 263 - protein, 127 aa, Homo sapiens; identical to SEQ ID NO: 257

SEQ ID NO: 264 - protein, 128 aa, Homo sapiens
QVQLVQSGAEVKKPGASVKVSCKVSGYTLTELSIHWVRQAPGKGLEWMGGFDPEDGETVYAQKFQGRVTMTEDTSSDTAYMELSSLRSEDTAVYYCATSFPIRGDPSYYYYYYGMDVWGQGTTVTVSS

SEQ ID NO: 265 - protein, 119 aa, Homo sapiens
QVQLVESGGGVVQPGRSLRLSCAASGFIFSTYGMHWVRQAPGKGLEWVAVISYDGSNKYNADSVKGRFTISRDNSKNTLYLQMNSLRVEDTAVYYCAIYGYYYYGLDVWGQGTTVTVSS

SEQ ID NO: 266 - protein, 127 aa, Homo sapiens
QVHLVESGGGVVQPGRSLRLSCAASGFSFRNYGMHWVRQAPGKGLEWVAVISGDENNKFYANSVKGRFTISRDNSKNTLSLQMNSLRPEDTARYYCAKGGDSSGWAWDGDNPPTDYWGQGTLVIVSS

SEQ ID NO: 267 - protein, 119 aa, Homo sapiens
QVQLQESGPGLVKPSGTLSLTCVVSGGSISSSNWGWVRQPPGKGLEWIGEIYLSGTTNYNPSLTSRVTISVDKSKNQFSLKLNSVTAADTAIYYCARPTAGAGGAFDIWGQGTVVTVSS

SEQ ID NO: 268 - protein, 122 aa, Homo sapiens
QVTLKESGPVLVKPTETLTLTCTVSGFSLSNARMGVSWIRQPPGKALEWLAHIFWNDENSYSTSLKTRLTISKDTSKSQVVLNMTNMDPVDTATYYCARTEWLLSDNWFDSWGQGTLVTVSS

SEQ ID NO: 269 - protein, 122 aa, Homo sapiens
QVQLVQSGAEVKKPGASVKVSCKASGDTFSSYYLHWVRQAPGQGLQWMGISNPSGGSTTYAQKFQGRVTMTGDTSTSTVYMELSSLRSEDTAVYYCARGGLVPAARNAFDIWGQGTMVTVSS

SEQ ID NO: 270 - protein, 119 aa, Homo sapiens
QVQLQESGPGLVKPSGTLSLTCVVSGGSISSSNWGWVRQPPGKGLEWIGEIYHSGTTNYNPSLRSRVTISVDKSKNQLSLKLNSVTAADTAIYYCARPTAGAGGAFDTWGQGTMVTVSA

SEQ ID NO: 271 - protein, 127 aa, Homo sapiens
QVQLVQSGAEVKKPGASVKVSCKASGYTFTTYGISWVRQAPGQGLEWMGWISAYNGNSNYGKKFQGRVTMTADTSTSTAYMELRSLRSDDTAVYYCARDLPIKVVVPAADYNWFDPWGQGTLVTVSS

SEQ ID NO: 272 - protein, 122 aa, Homo sapiens
QITLKESGPTLVKPTQTLTLTCTFSGFSLNTNGVAVGWIRQPPGKALEWLALIYWDDDKRYSPSLKSRLTITKDTSKNQVVLTMTNMDPVDTATYYCAHRRGILTEDAFDIWGQGTMVTVSS

SEQ ID NO: 273 - protein, 117 aa, Homo sapiens
EVQLVESGGGLVQPGESLRLSCAASGITVSSNYMSWVRQAPGKGLEWVSVIYSGGSTFYADSVKGRFIISRHNSKNTLYLQMNSLRAEDTAVYYCARDLNEHGLDVWGQGTTVSVSS

SEQ ID NO: 274 - protein, 122 aa, Homo sapiens
QVQLVQSGAEVKKPGASVKVSCKASGYTFTSYYMHWVRQAPGQGLEWMGIINPSAGSTSYAQKFQGRVTMTRDTSTSTVYMELSSLRSEDTAVYYCARGTLIPAHRGAFDIWGQGTMVTVSS

SEQ ID NO: 275 - protein, 123 aa, Homo sapiens
QVQLQESGPGLVKPSQTLSLTCTVSGGSISSGTYYWSWIRQPAGKGLEWIGRFYTSGSTNYNPSLKSRVTISVDASKNQFSLKLSSVTAADTAVYYCARARPDYYYYYAMDVWGQGTTVTVSS

SEQ ID NO: 276 - protein, 123 aa, Homo sapiens
EVQLVESGGGLVQPGRSLRLSCAASGFTFDDYAMHWVRQAPGKGLEWVSGISWNSGSIAYTDSVKGRFTISRDNAKNSLYLQMNSLRAEDTALYYCAKAHSTGHQYYYGMDVWGQGTTVTVSS

SEQ ID NO: 277 - protein, 130 aa, Homo sapiens
QVQLVQSGAEVKKPGASVKVSCKASGYTFTDYYMHWVRQAPGQGLEWMGWINPNSRGTNYAQKFQGRVTMTRDTSISTVYMELSRLTSDDTAVYYCARVVVLGYGRPNNYYDGRNVWDYWGQGTLVTVSS

SEQ ID NO: 278 - protein, 117 aa, Homo sapiens
QVTLRESGPALVKPTQTLSLTCTFSGFSLGTSGMCVSWIRQPPGKALEWLARIDWDDDKYYSTSLKTRLTISKDTSKNQVVLTMTNMDPVDTATYYCARGVVTYDYWGQGTLVTVSS

SEQ ID NO: 279 - protein, 124 aa, Homo sapiens
QVQLVQSGAEVKKPGSSVKVSCKASGDTFSSYTINWVRQAPGQGLEWMGRIIPILGIPNYAQKFQGRVTITADKSTSTAFMELSSLRSEDTAVYYCARGRGYSNYGASYYMDVWGKGTTVTVSS

SEQ ID NO: 280 - protein, 121 aa, Homo sapiens
EVQLVESGGGLVQPGRSLRLSCAASGFTFDDYAMNWVRQPPGKGLEWVSGISWNSDSIGYADSVKGRFTISRDNAKNSLYLQMNSLRAEDTAMYYCAKGRGAGYTSYMDVWGKGTTVTVSS

SEQ ID NO: 281 - protein, 123 aa, Homo sapiens
QVQLAQSGAEVKKPGASVKVSCKAAGYTFTSYDINWVRQATGQGLEWMGWMNSNSGNAGYAQKFQGRVTMTRDTSTSTAYMELSSLTSDDTAVYYCARMRTGWPTHGRPDDFWGRGTLVTVSS

SEQ ID NO: 282 - protein, 122 aa, Homo sapiens
EVQLVESGGGLVQPGGSLRLSCAASGFTVSSNYMSWVRQAPGKGLEWVSVIYPGGSAFYADSVKGRFTISRHNSNNTLCLQMNSLRTEDTAVYYCARSYDILTGYRDAFDIWGQGTMVTVSS

SEQ ID NO: 283 - protein, 122 aa, Homo sapiens
QVQLQQWGAGLLKPSETLSLTCAVSGGSFSAYYWSWIRQPPGKGLEWIGEINHSGSTNYNPSLRSRVTISVDTSKNQFSLKLSSVTAADTAVYYCARVGYSQGYYYYYMDVWGKGTTVTVSS

SEQ ID NO: 284 - protein, 123 aa, Homo sapiens
QMQLVQSGPEVKKPGTSVKVSCKTSGFTFTSSAIQWVRQARGQRLEWIGWIVVGSGNTNYAQKFQERVTITRDMSTSTAYMELSSLRSEDTAVYYCAAPHCNRTSCYDAFDLWGQGTMVTVSS

SEQ ID NO: 285 - protein, 125 aa, Homo sapiens
QVQLVQSGAEVKKPGSSVKVSCKASGGTFSSYSITWVRQAPGQGLEWMGRIIPVLGIANYAQKFQDRVTITADKSTSTAYMELSSLRSEDTAVYYCARVGVSGFKSGSNWYFDLWGRGTLVTVSS

SEQ ID NO: 286 - protein, 117 aa, Homo sapiens
EVQLVESGGGLVQPGGSLRLSCAASGLTVRSNYMTWVRQTPGKGLEWVSVIYSGGSTFYADSVKGRFTISRDNSKNTVYLQMNSLRAEDTAVYYCARDLVTYGLDVWGQGTTVTVSS

SEQ ID NO: 287 - protein, 129 aa, Homo sapiens
EVQLVESGGGVVRPGGSLRLSCAASGFIFDDYDMTWVRQAPGKGLEWVSGISWNGGNTGYADSVKGRFTISRDNAKNSLYLQMNSLRAEDTALYHCAVIMSPIPRYSGYDWAGGAFDIWGQGTMVTVSS

SEQ ID NO: 288 - protein, 127 aa, Homo sapiens
QVQLVESGGGVVQPGRSLRLSCAASGFTFSNYGMHWVRQAPGKGLEWVAVMSYDGSNKYYADSVKGRFTISRDNSKNTLYLQMNSLRAEDTAVYYCAKNLGPYCSGGTCYSLVGDYWGQGTLVTVSS

SEQ ID NO: 289 - protein, 129 aa, Homo sapiens
EVQLVESGGGVVRPGGSLRLSCAASGFIFDDYDMTWVRQAPGKGLEWVSGINWNGGSTGYADSVKGRFTISRDNAKNSLYLQMNSLRAEDTALYHCAVIMSPIPRYSGYDWAGDAFDIWGQGTMVTVSS

SEQ ID NO: 290 - protein, 123 aa, Homo sapiens
QVQLVQSGAEVKKPGASVKVSCKASGYTFGSFDINWVRQATGQGLEWMGRMNSNSGNTAYAQKFQGRVTMTRDTSTNTAYMELSSLRSEDTAMYYCARMRSGWPTHGRPDDFWGRGTLVTVSS

SEQ ID NO: 291 - protein, 121 aa, Homo sapiens
EVQLVESGGGLVQPGRSLRLSCAASGFTFDDYAMHWVRQAPGKGLEWVSGISWNSGTIGYADSVKGRFIISRDNAKNSLYLQMNSLRPEDTALYYCAKDIIRQGEDGMDVWGQGTTVTVSS

SEQ ID NO: 292 - protein, 118 aa, Homo sapiens
EVQLLESGGGLIQPGGSLRLSCAASGFTFSNYAMSWVRQAPGKGLEWVSGIISTSGGATYNADSVRGRFTTSRDNSKNILYLQMNSLRGEDTAVYYCVKGLFDWFPLWGQGTMVTVSS

SEQ ID NO: 293 - protein, 119 aa, Homo sapiens
EVQLVESGGGLVQPGGSLRLSCAASGFTFSRHWMTWVRQAPGKGLEWVANIKQDGSEKYYVDSVKGRLTISRDNAKNSLYLQMNSLRAEDTAVYYCARLGFYYGGADYWGQGTLVTVSS

SEQ ID NO: 294 - protein, 122 aa, Homo sapiens
NVQLVESGGGLVQPGGSLRLSCAASGFTFHHYAMHWVRQAPGKGLEWVSGISGSSDYRAYADSLKGRFTISRDYAKNSLWLQMNSLTSEDTAFYYCAKGVDYGGKLAYFDSWGQGTLVTVSS

SEQ ID NO: 295 - protein, 124 aa, Homo sapiens
QVQLVESGGGVVQPGRSLRLSCAASGFSFSSYVMNWVRQAPGKGQLEWVAVISYDGSSKYYADSVKGRFTISRDNSKNTLYLQMNSLRAEDTAVYYCARDIDSGYDPTPVFDYWGQGTLVTVSS

SEQ ID NO: 296 - protein, 122 aa, Homo sapiens
EVQLVESGGGLVQPGGSLRLSCAASGFTFSSYDLHWVRQGTGKRLEWVSAIGTAGDTYYLGSVKGRFTISRENAKNSLYLQMNSLRAGDTAVYYCARVLYDSSGFYNWFDPWGQGTLVTVSS

SEQ ID NO: 297 - protein, 116 aa, Homo sapiens
EVQLVESGGGLIQPGGSLRLSCAASEVTVSSNYMSWVRQAPGKGLEWVSLIYSGGTTYYADSVKGRFTISRDNSKNTLYLQMNSLRAEDTAVYYCARDFLRWHDLWGQGTLVTVSS

SEQ ID NO: 298 - protein, 124 aa, Homo sapiens; identical to SEQ ID NO: 279

SEQ ID NO: 299 - protein, 122 aa, Homo sapiens
QLQLQESGPGLVKPSETLSLTCTVSGGSISSSSYYWGWIRQPPGNGLEWIGSIYYSGSTYYNPSLKGRVSISVDTSKNQFSLKLSSVTAADTAVYYCARILVIFTLNWFDPWGQGTLVTVSS

SEQ ID NO: 300 - protein, 131 aa, Homo sapiens
EVQLVESGGGLVKPGGSLRLSCAASGFTFRDVWMSWVRQAPGKGLEWVGRIKSKIDGGTTDYAAPVKGRFTISRDDSKNTLYLQMNSLKTEDTAVYYCTTAGSYYYDTVGPGLPEGKFDYWGQGTLVTVSS

SEQ ID NO: 301 - protein, 116 aa, Homo sapiens; identical to SEQ ID NO: 297

SEQ ID NO: 302 - protein, 122 aa, Homo sapiens
QVQLQESGPGLVKPSETLSLTCTVSGGSVSSGSYYWSWIRQPPGKGLECIGYIYYSGSSNYNPSLKSRVTISVDTSKNQFSLKMSSVTAADTAVYYCAGSPVPPTIVGASYWGQGTLVTVSS

SEQ ID NO: 303 - protein, 121 aa, Homo sapiens
EVQLVQSGAEVKKPGESLKISCKGSGYSFTSYWIDWVRQMPGKGLEWMGIIYPGDSDTRYSPSFQGQVTISADKSTSTAYLQWSSLKASDTAMYYCARRGEAAGIWYFDLWGRGTLVTVSS

SEQ ID NO: 304 - protein, 124 aa, Homo sapiens
EVQLVESGGGLVQPGGSLRLSCAASGFTVSSNYMSWVRQAPGKGLEWVSVIYSAGSTYYADSVKGRFSISRDKSKNTLYLQMNSLRAEDTAVYYCAKEGGSGSLRYYYYGMDVWGQGTTVTVSS

SEQ ID NO: 305 - protein, 124 aa, Homo sapiens
EVQLVESGGGLVQPGGSLRLSCEASGFTFSSSEINWVRQAPGKGLEWVSHISSSGSIIYYADSVKGRFTISRDNAKNSLYLQMNSLRAEDTAVYYCARRSYRSSWYYYYGMDVWGQGTTVTVSS

SEQ ID NO: 306 - protein, 121 aa, Homo sapiens
QVQLAESGGGVVQPGRSLRLSCAASGFTFSSYAMHWVRQAPGKGLEWVAVISYDGSNKYYADSVKGRFTISRDNSKNTLYLQMNSLRAEDTAVYYCARSTSGSYYYGMDVWGQGTTVTVSS

SEQ ID NO: 307 - protein, 124 aa, Homo sapiens
QVQLVESGGGVVQPGRSLRLSCAASGFTFSTYAMHWVRQAPGKGLEWVAVISYDGSNKYYADSVKGRFTISRDNSKNTLYLQMIGLRAEDTAVYYCARDWAPTYYDMPSAFDIWGQGTMVTVSS

SEQ ID NO: 308 - protein, 119 aa, Homo sapiens
QVQLVQSGAEVRKPGSSVKVSCKASGGTFSSYAISWVRQAPGQGLEWMGGIIPVFGTANYAQKFQGRVTITADKSTSTAFMELNSLRSEDTAVYYCARIGSYPEYFQHWGQGTLVTVSS

SEQ ID NO: 309 - protein, 121 aa, Homo sapiens
QVQLQESGPGLVKPSQTLSLTCTVSGGSISSGGYFWSWIRQHPGKGLEWIGSIYYSGSTYYNPSLRSRITISVDTSKNQFSLKLSSVTAADTAVYYCARGGSGSYSLFDYWGQGTLVTVSS

SEQ ID NO: 310 - protein, 121 aa, Homo sapiens; identical to SEQ ID NO: 306

SEQ ID NO: 311 - protein, 121 aa, Homo sapiens; identical to SEQ ID NO: 306

SEQ ID NO: 312 - protein, 117 aa, Homo sapiens; identical to SEQ ID NO: 286

SEQ ID NO: 313 - protein, 122 aa, Homo sapiens
QVQLVQSGAEVKKPGSSVKVSCKASGGTFSSYAIIWVRQAPGQGLEWMGGIIPIFGTTNYAQKFQGRVTITADESTSTAYVELSSLRSEDTAVYYCARIGHFDSSGYYLDYWGQGTLVTVSS

SEQ ID NO: 314 - protein, 119 aa, Homo sapiens
EVQLVESGGGLVQPGGSLRLSCVASGFTFSFYWMSWVRQAPGKGLEWVANIKQDGGEKYYVDSVKGRFTISRDNAKNSLYLQMNSLRAEDTAVYYCARLSGSSWDFDYWGQGTLVTVSS

SEQ ID NO: 315 - protein, 129 aa, Homo sapiens
EVQLVESGGGVVRPGGSLRLSCAASGFTFDDYGMSWVRQAPGKGLEWVSAINWNGGSTGYADSVKGRFTISRDNAKNSLYLQMNSLRAEDTALYHCARRRSSSRYSSGWYMYYYYMDVWGKGTTVTVSS

SEQ ID NO: 316 - protein, 119 aa, Homo sapiens; identical to SEQ ID NO: 314

SEQ ID NO: 317 - protein, 120 aa, Homo sapiens
QITFKESGPTLVKPTETLTLTCTFSGFSVSTSGEGVGWIRQPPGKALEWLAVIYWDDDKRYSPSLKSRLTITRDTSKNQVVLTMTNMDPVDTATYYCAHRLWFRDAFDIWGQGTTVTVSS

SEQ ID NO: 318 - protein, 119 aa, Homo sapiens
EVQLVESGGGLVQPGGSLRLSCAASGFTFSTYWMTWVRQAPGKGLEWVANIKQDGSEKYYVDSVKYRFTISRDNAKNSLYLQMNSLRAEDTAVYYCARVGSSSWYFDYWGQGTLVTVSS

SEQ ID NO: 319 - protein, 121 aa, Homo sapiens
QVQLVESGGGVVQPGRSLRLSCAASGFTFSSYAMHWVRQAPGKGLEWVAGISYDGSNKYYADSVKGRFTISRDNSKNTLYLQMNSLRAEDTAVYYCARADTMVRGTYFEYWGQGTLVTVSS

SEQ ID NO: 320 - protein, 119 aa, Homo sapiens
QVQLVESGGGVVQPGRSLRLSCAASGFTFSYYPMHWLWVRQAPGKGLEWVAVTSYDGTNKYYADSVKGRFTISRDNSKNTLYLQMNSLRAEDTAVYYCARGGATNFDYWGQGTLVTVSS

SEQ ID NO: 321 - protein, 126 aa, Homo sapiens
EAQLVESGGGLVQPGRSLRLSCAASGFTFDDSAMHWVRQAPGKGLEWVSGISWNSGNVGYADSVKGRFTISRDNAKNSLYLQMNSLRAEDTALYYCTKASRYCSSTICYWNWFDPWGQGTLVTVSS

SEQ ID NO: 322 - protein, 126 aa, Homo sapiens
EVQLVESGGGLVQPGGSLRLSCAASGFTFSSYEMNWVRQAPGKGLEWVSYISSSGSAIYYADSVKGRFTISRDNAKNSLYLQMNSLRVEDTAVYYCAREARSRYFDWLPSYYFDYWGQGTLVTVSS

SEQ ID NO: 323 - protein, 129 aa, Homo sapiens; identical to SEQ ID NO: 315

SEQ ID NO: 324 - protein, 127 aa, Homo sapiens
QVHLVESGGGVVQPGRSLRLSCAASGFTFSNYGMHWVRQAPGKGLEWVAVISNDEFNKFYANSVKGRFTISRDNSKNTVYLQLNSLRTEDTARYYCAKGGDGSGWAWDGDNPPTDYWGQGTLVIVSS

SEQ ID NO: 325 - protein, 123 aa, Homo sapiens
QMQLVQSGPEVKKPGTSVKVSCKASGFTFMSSAVQWVRQARGQRLEWIGWIVIGSGNTNYAQKFQERVTITRDMSTSTAYMELSSLRSEDTAVYYCAAPYCSSISCNDGFDIWGQGTMVTVSS

SEQ ID NO: 326 - protein, 124 aa, Homo sapiens
EVQLVQSGAEVKKPGESLKISCKGSGYSFTSYWIGWVRQMPGKGLEWMGIIYPGDSDTRYSPSFQGQVTISADKSISTAYLQWSSLKASDTAMYYCARPDYSSGWFSYWYFDLWGRGTLVTVSS

SEQ ID NO: 327 - protein, 121 aa, Homo sapiens
QVQLVQSGAEVKKPGASVKVSCKVSGYTLTELSIHWVRQAPGKGLEWMGGFDPEDAETIYAQQFQGRVTMTEDTSTDTAYMELSSLKSEDTALYYCATGFAVFGRAAVPYWGQGTLVTVSS

SEQ ID NO: 328 - protein, 121 aa, Homo sapiens
QVQLVESGGGVVQPGRSLRLSCAASGFTFSTYAMHWVRQAPGKGLAWVALISYDGYNKYYADSVRGRFTISRINSKNTLSLQMNSLRAEDTAVYYCARGSAGNYYYGMDVWGQGTTVTVSS

SEQ ID NO: 329 - protein, 121 aa, Homo sapiens
EVQLVQSGAEVKKPGESLKISCKGSGYSFTSHWIGWVRQMPGKGLEWMGIIYPGDSDTRYSPSFQGQVTISADKSISTAYLQWSSLKASDTAMYYCASALRERGVQLWSVWGQGTLVTVSS

SEQ ID NO: 330 - protein, 122 aa, Homo sapiens
QVQLVESGGGVVQPGRSLRLSCAASGFTFSSYAMHWVRQAPGKGLEWVAVISYDGSNKYYADSVKGRFTISRDNSKNTLYLQMNSLRVEDTAVYYCARDQEWFRELFLFDYWGQGTLVTVSS

SEQ ID NO: 331 - protein, 128 aa, Homo sapiens
EVQLVESGGGLVKPGGSLRLSCAASGFTFSSYSMNWVRQAPGKGLEWVSSISNSNSFIYYADSMKGRFTISRDNAKNSLYLQMNSLRAEDTAVYYCARVNGNSNWNFGSYYYYYMDVWGKGTTVTVSS

SEQ ID NO: 332 - protein, 122 aa, Homo sapiens; identical to SEQ ID NO: 313

SEQ ID NO: 333 - protein, 124 aa, Homo sapiens
EVQLVESGGGLVKPGGSLRLSCAASGFTFSGYSMNWVRQAPGKGLEWVSSISSSSSYIYYADSVKGRFTISRDNAKNSLYLQMNSLRAEDTAVYYCARWLQLRSDYYYFGMDVWGQGTTVTVSS

SEQ ID NO: 334 - protein, 122 aa, Homo sapiens
QVQLVQSGAEVKKPGSSVKVSCKASGGTFSSYAISWVRQAPGQGLEWMGGIIPIFGAANYAQNFQGRVTITADESTSTGYMQLSSLRFEDTAVYYCARTSHYDSSGSYFEYWGQGTLVTVSS

SEQ ID NO: 335 - protein, 121 aa, Homo sapiens
QVQLVESGGGVVQPGRSLRLSCAASGFTFSSYALFWVRQAPGKGLEWVAVISYDGNNKYYADSVRGRFTISRDNSKNTLYLQMNSLRPEDTAVYYCARPYTGSYKSYMDVWGKGTTVTVSS

SEQ ID NO: 336 - protein, 123 aa, Homo sapiens
QVQLQESGPGLVKPSETLSLTCTVSGGSISSYYWSWIRQPPGKGLEWIGYIYYSGSTNYNPSLKSRVTISVDMSKNQFSLKLRSVTAADTAVYYCARAPRERLQWGEYYFDYWGQGTLVTVSS

SEQ ID NO: 337 - protein, 118 aa, Homo sapiens
QVQLVESGGGVVQPGRSLRLSCAASGFTFSTYGMHWVRQAPGKGLEWVAVISYDGSNKYYADSVKGRFTISRDNSKNTLYLQMNSLRAEDTAMYYCAKDGSIAAADYWGQGTLVTVSS

SEQ ID NO: 338 - protein, 121 aa, Homo sapiens
EVQLVQSGAEVKKPGESLKISCKGSGYSFTNSWIGWVRQMPGKGLEWMGIIYPGDSDTRYSPSFQGQVTISADKSISTAYLQWSSLKASDTAIYYCATHRCSGGFCYLAYWGQGTLVTVSS

SEQ ID NO: 339 - protein, 128 aa, Homo sapiens
QVQLVESGGGVVQPGRSLRLSCAASGFTFSSYGMHWVRQAPGKGLEWVAVIWYDGSKKDYADSVKGRFTISRDNSKNTLYLQMNSLRAEDTAVYYCARDQSQGAYILTGYRGYGMDVWGQGTTVTVSS

SEQ ID NO: 340 - protein, 123 aa, Homo sapiens
QVQLQQWGAGLLKPSETLSLTCAVYGGSFSGHYWSWIRQPPGKGLEWIGEINHSGSTNYNPSLKSRVTISVDTSKNQFSLKLSSVTAADTAVYYCARPPQAARIHYYYYMDVWGKGTTVTVSS

SEQ ID NO: 341 - protein, 121 aa, Homo sapiens; identical to SEQ ID NO: 280

SEQ ID NO: 342 - protein, 112 aa, Homo sapiens
EVQLVESGGGLIQPGGSLRLSCAASGFIVSSNYMSWVRQAPGKGLEWVSVIYSGGSTYYADSVKGRFTISRDNSKNTLYLQMNSLRAEDTAVYYCARESTQWGQGTLVTVSS

SEQ ID NO: 343 - protein, 119 aa, Homo sapiens
QITLKESGPPLVEPKQTLTLTCTFSGFSLTTSGEAVGWIRQPPGKALEWLALIYWDDDKHYSPSLRNRLTITRDTSKNQVVLTLTNVDPADTGTYYCAHRAVILNFDHWGQGFLVTVSS

SEQ ID NO: 344 - protein, 121 aa, Homo sapiens
QVQLVESGGGVVQPGRSLRLSCAASGFTFSSYAMHWVRQAPGKGLEWVAVISYDGINKYYADAVKGRFTISRDNSKNTLYLQMNSLRAEDTAVYYCARPRSGSYYAYFDYWGQGTLVTVSS

SEQ ID NO: 345 - protein, 125 aa, Homo sapiens
EVQLVESGGGLVQPGRSLRLSCAASGFTFDDYAMHWVRQAPGKGLEWVSGISWNSGSIGYADSVKGRFTISRDNAKNSLYLQMNSLRAEDTALYYCAKVGYTISRQWLVGEFDYWGQGTLVTVSS

SEQ ID NO: 346 - protein, 121 aa, Homo sapiens; identical to SEQ ID NO: 303

SEQ ID NO: 347 - protein, 123 aa, Homo sapiens
QLQLQESGPGLVKPSETLPLTCTVSGGSISSSSYYWGWIRQPPGKGLQWIGNIYYSGSTYYNSSLKSRVTISVDTSKNQFSLKLSSVTAADTAVYYCARQSRGYSYAWSFDYWGQGTLVTVSS

SEQ ID NO: 348 - protein, 124 aa, Homo sapiens
QVQLVESGGGVVQPGRSLRLSCAASGFTFSNYGIHWVRQAPGQGLEWVAGIWYDGSNKYYVDSVKGRFTISRDNSKNTLYLQMNSLRAEDTAVYYCAGSSGEGGLYYYYGMDVWGQGTTVTVSS

SEQ ID NO: 349 - protein, 122 aa, Homo sapiens
QVQLVESGGGVVQPGRSLRLSCAASGFTFDSYGVHWVRQAPGKGLEWVAVISYDGSNKHYADSVKGRFTISRDNSKNTLYVQMNSLRTEDTAVYYCARDSGGNYGDSYFDYWGQGTLVTVSS

SEQ ID NO: 350 - protein, 121 aa, Homo sapiens; identical to SEQ ID NO: 328

SEQ ID NO: 351 - protein, 126 aa, Homo sapiens
QVTLKESGPVLVKPTETLTLTCAVSGFSLSNAKMGVSWIRQPPGKALEWLAHIFSNDEKAYSTSLKTRLTISKDTSKSQVVLTVTNMDPVDTATYYCARIVLGASGTYPSPGFDPWGQGTLVTVSS

SEQ ID NO: 352 - protein, 119 aa, Homo sapiens
EVQLVESGGGLVQPGGSLRLSCAASGFTFSSYWMHWVRQVPGKGLVWVSRINSDGSSTSYADSVKGRFTISRDNAKNTLYLEMNSLRAQDTAVYYCAGSPWLRGDIDYWGQGTLVTVSS

SEQ ID NO: 353 - protein, 127 aa, Homo sapiens
QVQLVQSGSELTKPGASVKVSCKASGYTFTSYAMNWVRQAPGQGLEWMGWINTDTGNPTYAQGFTGRFVFSLDTSVSTAYLQISSLKAEDTAVYYCARDPSYCSSTRCYTVGWFDPWGQGTLVTVSS

SEQ ID NO: 354 - protein, 121 aa, Homo sapiens
QVQLQESGPGLVKPSQTLSLTCTVSGDSINSGNYYWSWIRQPAGKGLEWIGRMFTSGSTNYNPSLTSRVTMSIDTSKNQFSLNLNSVTAADTAMYYCARGHVAAWESCYYWGQGILVTVSS

SEQ ID NO: 355 - protein, 130 aa, Homo sapiens
EVQLVESGGGVVRPGGSLRLSCAASGFTLDDYGLSWVRHAPGKGLEWVSGINWNGGRTAYADSVKGRFTISRDNAKNSLYLQMNSLRAEDTALYHCARARGPSEQYYDLLTGYYDAFDIWGQGTMVTVSS

SEQ ID NO: 356 - protein, 122 aa, Homo sapiens
EVQLLESGGGLVHPGGSLRLSCAASGFTFSSYALSWVRQAPGKGLEWVSAISGSGGSTYYADSVKGRFTISRDNSKNTLYLQMNRLRAEDTAVYYCAQMGPLGSTSSAADYWGQGTLVTVSS

SEQ ID NO: 357 - protein, 130 aa, Homo sapiens
QVQLVQSGAEVKKPGASVKVSCKASGYTFTSYDINWVRQATGQGLEWMGWMNPNSGNTGYAQKFQGRVTMTRNTSISTAYMELSSLRSEDTALYYCAREARYFDWIFEGSDYYYYGMDVWGQGTTVTVSS

SEQ ID NO: 358 - protein, 124 aa, Homo sapiens; identical to SEQ ID NO: 305

SEQ ID NO: 359 - protein, 129 aa, Homo sapiens
EVQLVESGGGLVQPGRSLRLSCTASGFIFGDYAMGWVRQAPGKGLEWVGFIRGKAYDGTTEYAASVKGRFTISRDDSKYIAHLQMNSLKTEDTAVYYCIRDYDFWGGYYYHPLRAFDIWGRGTMVTVSS

SEQ ID NO: 360 - protein, 119 aa, Homo sapiens
QITLKESGPTLVKPTQTLTLTCTFSGFSLSTSGVGVGWIRQPPGKALEWLALIYWDDDKRYSPSLKSRLSITKDTSKNQVVLTMTNMDPVDTGTYYCARHQIVVLFDMWGQGTRVTVSS

SEQ ID NO: 361 - protein, 122 aa, Homo sapiens
QVQLVQSGAEVKKPGSSVKVSCKASGGTFSSYAISWVRQAPGQGLEWMGGIIPIFGTANYAQKFQGRVTITADESTSTAYMELSSLRSEDTAVYYCAITYYYDSSGYWWDDWGQGTLVTVSS

SEQ ID NO: 362 - protein, 126 aa, Homo sapiens
QLQLQESGPGLVKPSETLSLTCTVSGGSISSSSYYWGWIRQPPGKGLEWIGTIYYSGSTYYNPSLKSRVTISVDTSKKQFSLKLSSVTAADTAVYYCAGEEVRGVKLYYYYAMDVWGQGTTVTVSS

SEQ ID NO: 363 - protein, 119 aa, Homo sapiens
EVQLVESGGRLVLPGGSLRLSCAASGFTFSVYEMNWVRQAPGKGLEWLSYIGTSGSPIYYADSVKGRFTVSRDNAKNSLYLQMNSLRVEDTALYYCARDRGWNYGLDYWGQGTLVTVSS

SEQ ID NO: 364 - protein, 123 aa, Homo sapiens
QVQLVESGGGVVQPGRSLRLSCAASGFTFSSYAMHWVRQAPGKGLEWVALISSDGGNKFYADSVKGRFTISRDNSKNTLYLQMNSLRAEDTAVYYCARDVPTTVTAFTVFTYWGQGTLVTVSS

SEQ ID NO: 365 - protein, 121 aa, Homo sapiens
QVQLVESGGGVVQPGRSLRLSCAASGFAFSNYAIHWVRQAPGKGLEWVAVISYDGNNKDYADSVKGRFTISRDNSKNTLYLQMNSLRAEDTAVYYCARVPVMVRGVYFDYWGQGTLVTVSS

SEQ ID NO: 366 - protein, 119 aa, Homo sapiens
QVQLVQSGAEVKKPGASVKVSCKVSGYTFTSYDINWVRQATGQGLEWMGWMNPNSGHTGYAQKFQGRVTMTRNTSISTAYMELSSLRYEDTAVYYCARGYGLTYYMDVWGKGTTVTVSS

SEQ ID NO: 367 - protein, 123 aa, Homo sapiens
QVQLAQSGAEVKKPGASVKVSCKAAGYTFTSYDINWVRQATGQGLEWMGWMNPNSGNAGYAQKFQGRVTMTRDTSISTAYMELSSLRSEDTAVYYCARMRSGWPTHGRPDDFWGRGTLVTVSS

SEQ ID NO: 368 - protein, 124 aa, Homo sapiens
EVQLLQSGGGLVQPGGSLRLSCAASGFTFRNYAMSWVRQAPGKGLEWVSAISGSGGTTYYADSVKGRFTISRDNSKNTLYLQMNSLRAEDTAVYYCAKNERITMLVVVTLFDYWGQGTLVTVSS

SEQ ID NO: 369 - protein, 124 aa, Homo sapiens
EVQLVESGGGLVQPGGSLRLSCAASGFTVSGNYMSWVRQAPGKGLEWVSVIYSGGSTYYADSVKGRFTISRDNSKNTLYLQMNSPRAEDTAVYYCARDPSAYYDILTGYSGDVWGKGTTVTVSS

SEQ ID NO: 370 - protein, 123 aa, Homo sapiens
QVQLVESGGGVVQPGRSLRLSCAASGFSFSSYVMNWVRQAPGKGLEWVAVISYDGSSKYYADSVKGRFTISRDNSKNTLYLQMNSLRAEDTAVYYCARDIDSGYDPTPVFDYWGQGTLVTVSS

SEQ ID NO: 371 - protein, 123 aa, Homo sapiens
QVQLQESGPGLVKPSGTLSLTCAVSGGSISSSNWWTWVRQPPGKGLEWIGEIYHSGSTNYNPSLKSRVTISVDKSKNQFSLKLSSVTAADTAVYYCASRWGDYFDSSGAYDSWGQGTLVTVSS

SEQ ID NO: 372 - protein, 127 aa, Homo sapiens
EVQLVESGGGLVKPGGSLRLSCAASGFTFSSYSMNWVRQAPGKGLEWVSCISSSSSFIYYADSVKGRFTISRDNAKNSLYLQMNSLRAEDTAVYYCARDPVWVDGELLSGGIPFDYWGQGTLVTVSS

SEQ ID NO: 373 - protein, 129 aa, Homo sapiens
QLQLQESGPGLVKPSETLSLTCTVSGGSIRSSSYYWGWIRQPPGKGLEWIASIYYSGSTYYNSSLKSRVTISVDTSKNQFSLKVNSMTAADTAVYYCAILWRGSSWADRHYYYYSMDVWGQGTTVTVSS

SEQ ID NO: 374 - protein, 117 aa, Homo sapiens
QVQLVESGGGVVQPGRSLRLSCTASGFTFSSYAMHWVRQAPGKGLEWVALISYDGNNKYYADSAKGRFTISRDNSKNTLYLQMNSLRSEDTAVYYCARDLGRGLDPWGQGTLVTVSS

SEQ ID NO: 375 - protein, 118 aa, Homo sapiens
EVQLLESGGGLIQPGGSLRLSCAASGFTFSNYAMSWVRQAPGKGLEWVSGIISSSGGATYNADSVRGRFTTSRDNSKNILYLQMNSLRGEDTAVYYCVKGLFDWFPLWGQGTMVTVSS

SEQ ID NO: 376 - protein, 122 aa, Homo sapiens
QVQLQESGPGLVKPSQTLSLTCAVSGASISSGSYYWSWIRQPAGKGLEWIGRIYTSGNTNYNPSLKSRVTISVDTSKNQFSLKLSSVTAADTAVYYCATGYIGTYYYYMDVWGKGTTVTVSS

SEQ ID NO: 377 - protein, 123 aa, Homo sapiens
EVQLVESGGGLVQPGRSLRLSCAASGFTFDDYAMHWVRQAPGKGLEWVSGISWNSGSIGYADSVKGRFTISRDNAKNSLYLQMNSLRAEDTALYYCAKVSSITSLLGYYFDSWGQGTLVTVSS

SEQ ID NO: 378 - protein, 117 aa, Homo sapiens; identical to SEQ ID NO: 278

SEQ ID NO: 379 - protein, 119 aa, Homo sapiens
QVQLVESGGGVVQPGRSLRLSCAASGFTFSNYAMHWVRQAPGKGLDWVAVISYDGSNRYYAASVKGRFTISRDNSKNTLYLQMNSLRTEDTAVYFCARGDGYRSQFDPWGQGTLVTVSS

SEQ ID NO: 380 - protein, 120 aa, Homo sapiens; identical to SEQ ID NO: 317

SEQ ID NO: 381 - protein, 128 aa, Homo sapiens
EVQLLESGGGLVQPGGSLRLSCAASGFTFNNYAMSWVRQAPGKGLEWVSAIGGSGGSTYYADSVKGRFTVSRDNSENTLYLQMSSLRAEDTAVYYCARVEGDWLLGGPYYHYYGMDVWGQGTTVTVSS

SEQ ID NO: 382 - protein, 122 aa, Homo sapiens; identical to SEQ ID NO: 299

SEQ ID NO: 383 - protein, 119 aa, Homo sapiens
EVQLVESGGGLVQPGGSLRLSCAASGFTFSIYWMSWVRQAPGKGLQWVANIKQDASEKYYVDSVKGRFTISRDNAKNSLYLQMNSLRAEDTAVYYCARLGGSSWHFDYWGQGTLVTVSS

SEQ ID NO: 384 - protein, 131 aa, Homo sapiens
QLQLQESGPGLVKPSETLSLTCTVSGGPISSSRYYWGWIRQPPGKGLEWIGSIYYSGSTYYNPSLKSRVTISVDTSKNQFSLKLNSVTAADTAVYYCARHDGSGEMDTITWGPIYYYMDVWGKGTTVTVSS

SEQ ID NO: 385 - protein, 120 aa, Homo sapiens; identical to SEQ ID NO: 317

SEQ ID NO: 386 - protein, 119 aa, Homo sapiens
QVQLVQSGAEVKKPGASVKVSCKASGYTFTSYGMHWVRQAPGQRLEWMGWINVGNGNTKYSQRFQGRVTITRDTSASTAYMELSSLRSEDTAVYYCAMGPSAFSWLDPWGQGTLVTVSS

SEQ ID NO: 387 - protein, 121 aa, Homo sapiens; identical to SEQ ID NO: 306

SEQ ID NO: 388 - protein, 123 aa, Homo sapiens
QITLKESGPTLVKPTQTLTLTCTFSGFSLNTSGVGVGWIRQPPGKALEWLALIYWDDDKRYNPSLKSRLTITKDTSKNQVVLTMTNMDPVDTATYYCAHRPPSYHGWCYFDYWGQGNLVTVSS

SEQ ID NO: 389 - protein, 117 aa, Homo sapiens
QVQVVQSGAEVKKPGASVKVSCKASGYTFKNYGISWVRQAPGQGLEWMGWISAYTGNTNYAQKFQGRMTMTTDTSTGTGYMELRSLRSDDTAVYYCARVQRRRLDYWGQGTLVIVSS

SEQ ID NO: 390 - protein, 123 aa, Homo sapiens; identical to SEQ ID NO: 340

SEQ ID NO: 391 - protein, 119 aa, Homo sapiens
EVQLVQSGAEVKKPGESLKISCKGSGYSFTSYWIGWVRQMPGKGLEWMGIIYPGDSDTTYNPSFQGQVTISADKSLTTAFLHWSSLKASDTAIYYCARRFYGPSSFDYWGQGTLVIVSS

SEQ ID NO: 392 - protein, 125 aa, Homo sapiens
QVQLVQSGAEVKRPGASMNISCKASGYNFNNNYIYWVRQAPGQGLEWMGVVNPTGGGTAYAQGFQDRVTITSDTPRNTVYLGVTGLHSEDTAVYFCARGGEWRIVPGGRDYFDYWGQGTLVTVSA

SEQ ID NO: 393 - protein, 131 aa, Homo sapiens
EVQLVQSGAEVKKPGESLKISCKGFGYNFTNYWIGWVRQMPGKGLEWMGIIYPGDSETRNSPSFQGQVTISADKSMSTAYLQWSSLKASDTAMYYCARLGVSKYCSGGRCLSGGSNWFDPWGQGTLVTVSS

SEQ ID NO: 394 - protein, 118 aa, Homo sapiens
EVHLVGSGGGLIQPGGSLRLSCAASGFTVSSNFMSWVRQAPGKGLEWVSIIHNGGDSYYTDSVKGRFTISRDNSKNTLYLQMNNLRAEDTAVYYCASSSWLRGAFDIWGQGTMVTVSS

SEQ ID NO: 395 - protein, 123 aa, Homo sapiens; identical to SEQ ID NO: 284

SEQ ID NO: 396 - protein, 128 aa, Homo sapiens
EVQLVESGGDLVKPGRSLRLSCSASGFTFGDYTMSWFRQAPGKGLEWVAFIRSKAYGGTTEYAASVIGRFTISRDDSKSIAYLQMNSLKSEDTAVYYCSRVRGSFYGSVGKNYGMDVWGQGTTVTVSS

SEQ ID NO: 397 - protein, 123 aa, Homo sapiens; identical to SEQ ID NO: 370

SEQ ID NO: 398 - protein, 122 aa, Homo sapiens; identical to SEQ ID NO: 334

SEQ ID NO: 399 - protein, 122 aa, Homo sapiens
EVQLVQSGAEVKKPGESLKISCKGSGYSFTTYWIGWVRQMPGKGLEWMGIIYPGDSDTRYSPSFQGQVTISADKSISTAYLQWSSLKASDTAMYYCARRRGGIGIEYGMDVWGQGTTVTVSS

SEQ ID NO: 400 - protein, 125 aa, Homo sapiens
QVQLVESGGGVVQPGRSLRLSCAASGFTFSSYAMHWVRQAPGKGLEWVADISYDGSEKYYADSVKGRFTIYRDNSKNTLYLQMNSLRAEDTAVYYCAKDFGGDNTAMVEYFFDFWGQGTLVTVSS

SEQ ID NO: 401 - protein, 122 aa, Homo sapiens
QVQLQESGPGLVKPSETLSLTCTVSGGSVSSGSYYWSWIRQPPGKGLECIGYIYYSGSSNYNPSLKSRVTISVDTSKNQFSLKMSSVTAADTAVYYCAGSPVPPTIVGASYWGQGTLVTDSS

SEQ ID NO: 402 - protein, 120 aa, Homo sapiens
QVQLVESGGGVVQPGRSLRLSCAASGFTFSNYGMHWVRQAPGKGLEWVAVISYDGTNKYYADSVKGRFTISRDNSKNTLYLQMNSLRADDTAVYYCAKGRGNYLTFFDSWGQGTLVTVSS

SEQ ID NO: 403 - protein, 127 aa, Homo sapiens
EVQLVESGGGLVQPGGSLRLSCAASGLTVSSNYMSWVRQAPGKGLEWVSVIYSGGSTYYADSVKGRFTISGDNSKNTLYLQMNSLRVDDTAVYYCARDPGSRYSGGWYDYYYAMDVWGQGTTVTVSS

SEQ ID NO: 404 - protein, 116 aa, Homo sapiens
EVQLVQSGAEVKKPGESLKISCKGSGYSFPTYWIGWVRQMPGKGLEWMGIIYPGDSDTRYGPSFQGQVTISADKSISTAYLQWSSLKASDTAMYYCARRDTDFDYWGQGTLVTVSS

SEQ ID NO: 405 - protein, 123 aa, Homo sapiens
QMQLVQSGPEVKKPGTSVKVSCKASGFTFTSSAVQWVRQARGQRLEWIGWIAVGSGNTNYAQKFQERVSITRDMSTSTAYMELSSLRSEDTAVYYCAAPYCSRTSCHDAFDIWGQGTKVTVSS

SEQ ID NO: 406 - protein, 125 aa, Homo sapiens
QVQLVESGGGVVQPGRSLRLSCVASGFTFSSYGMHWVRQAPGKGLEWVAVISFDGSNKYYADSVKGRFTISRDNSKNTLYLQMNSLRAEDTAVFYCAKDLPPYASGWYEGGFDYWGRGTQVTVSS

SEQ ID NO: 407 - protein, 120 aa, Homo sapiens
QVQLVESGGGVVQPGRSLRLSCAASGFTFSSYGMHWVRQAPGKGLEWVAVVSYDGSNKYYTDSVKGRFTISRDNSKNTLFLQMIGLREEDTAVYYCAQGRGGYYSPFDDWGQGTLVTVSS

SEQ ID NO: 408 - protein, 124 aa, Homo sapiens
QVTLKESGPVLVKPTETLTLTCTVSGFSLSNARMGVSWIRQPPGKALEWLAHIFSGDEKSYSTSLKSRLTISKDTSKSQVVLTMTNMDPLDTATYYCARTTWGTWIQAWYFDIWGRGTLVTVSS

SEQ ID NO: 409 - protein, 124 aa, Homo sapiens
QVQLVESGGGVVQPGRSLRLSCAASGFTFSSYGMHWVRQAPGKGLEWVAVIWFDGSNKHYADSVKGRFTISRDNSKNTLYLQMNSLRAEDTAVYYCAREGDFWSGYYTGWFDPWGQGTLVTVSS

SEQ ID NO: 410 - protein, 124 aa, Homo sapiens
QVQLVESGGGVVQPGRSLRLSCAASGFTFSSYGMHWVRQAPGKGLEWVAVISYDGSNKYYADSVKGRFTISRDNSKNTLYLQMNSLRAEDTAVYYCAKDLTIVVIPAAPNFDYWGQGTLVTVSS

SEQ ID NO: 411 - protein, 129 aa, Homo sapiens
EVQLLESGGGLVQPGGSLRLSCAASGFTFSSYAMSWVRQAPGKGLEWVSFISGTGDSTYYADSVKGRFTISRDNSKNTLYLQMNSLRAEDTAVYYCAKDQARVQDYIWGSYRSYGMDVWGLGTTVTVSS

SEQ ID NO: 412 - protein, 121 aa, Homo sapiens; identical to SEQ ID NO: 291

SEQ ID NO: 413 - protein, 123 aa, Homo sapiens; identical to SEQ ID NO: 290

SEQ ID NO: 414 - protein, 124 aa, Homo sapiens; identical to SEQ ID NO: 333

SEQ ID NO: 415 - protein, 119 aa, Homo sapiens; identical to SEQ ID NO: 314

SEQ ID NO: 416 - protein, 114 aa, Homo sapiens
EVQLVESGGGLVQPGGSLRLSCAASGFSVSTNYMSWVRQAPGKGLEWVSVIYSGGSTFYADSVKGRFTISRDNSKNTLYLQMNSLRAEDTAVYYCARDYRDWIWGQGTLVTVSS

SEQ ID NO: 417 - protein, 129 aa, Homo sapiens
QITLKESGPTLVKPTQTLTLTCTFSGFSLSTSGVGVGWIRQPPGKALEWLALIYWDDDKRYSPSLKSRLTITKDTSKNQVVLTMTNMDPVDTATYYCAHNRFQYCSSTTCYTLLPFDYWGQGTLVTVSS

SEQ ID NO: 418 - protein, 121 aa, Homo sapiens; identical to SEQ ID NO: 335

SEQ ID NO: 419 - protein, 126 aa, Homo sapiens
QVQLVESGGGVVQPGRSLRLSCAASGFTFSSYAMHWVRQAPGKGLEWVAVISYDGSNKYYADSVKGRFTISRDNSKNTLYLQMSSLRAEDTAVFYCARGDGDVYNFLLVRNWFDPWGQGTLVTVSS

SEQ ID NO: 420 - protein, 121 aa, Homo sapiens
QLQLQESGPGLVKPSETLSLTCTVSGGSISSSSYYWGWIRQPPGKGLEWIGSFYYSGSTYYNPSLKSRVTISVDTSKNQFSLNLSSVTAADTAVYSCASLWFGDLYSFDYWGQGTLVTVSS

SEQ ID NO: 421 - protein, 119 aa, Homo sapiens
EVQLVESGGGLVQPGGSLRLSCADSAFTFSSFWMSWVRQAPGKGLEWVANIKQDGSEKFYLDSVKGRFTISRDNAKNSLYLQMNSLRAEDTAVYYCARLGRSSWNFDYWGQGTLVTVSS

SEQ ID NO: 422 - protein, 125 aa, Homo sapiens
QVQLQESGPGLVKPSQTLSLTCTVSGDSISSGSYYWSWIRQPAGKGLEWIGRIYTSGSTTYNPSLKSRVTISVNTSKNQFSLNLSSVTAADTAVYYCARVGGISPYYYYYYMDVWGKGTTVTVSS

SEQ ID NO: 423 - protein, 123 aa, Homo sapiens
QVQLVQSGAEVKKPGASVKVSCKASGYTFTSYDINWVRQATGQGLEWMGWMNPNSGNAGYGQKFQGRVTMTRNTSISTAYMELSSLRSEDTAVYYCARMRSGWPTHGRPDDYWGRGTLVTVSS

SEQ ID NO: 424 - protein, 122 aa, Homo sapiens
QVQLQESGPGLVKPSQTLSLTCTVSGGSISSGGYYWSWIRQHPGKGLEWIGYIYYSGSTYYNPSLKSRVTISVDTSKNQFSLKLSSVTAADTAVYYCASAKLVATISYFDYWGQGTLVTVSS

SEQ ID NO: 425 - protein, 119 aa, Homo sapiens
QVQLQQWGAGLLKPSETLSLTCAVYGGSFSGYYWNWLRQPPGKGLEWIGEINHSGSTNYNPSLKSRVTISVDTSKNQFSLKLSSVTAADTAVYYCARVGGYYYYYMDVWGKGTTVTVSS

SEQ ID NO: 426 - protein, 115 aa, Homo sapiens
EVRLLESGGGLVQPGGSLRLSCAASGFTFSDYAMNWVRQAPGKGLEWVSAISATGGSTFYADSVKGRFSISRDNSKNSLVLQMNSLRAEDTAVYYCAKPYGMDVWGQGTTVTVSS

SEQ ID NO: 427 - protein, 131 aa, Homo sapiens
QGQLVQSGGDVVQPGKSLRLSCAASGFTFTNYAMHWVRQAPGKGLEWVAVISNDGSNEKYVDSVKGRFSLSRDNSKNTVYLDMHSLRPEDTAIYYCARDRSNLERLVMTFGGIIAGAFDIWGQGARVTVSS

SEQ ID NO: 428 - protein, 121 aa, Homo sapiens
QVQLVESGGGVVQPGRSLRLSCAASGFTFSSYAMYWVRQAPGKGLEWVAVISYDGINKYYADSVKGRFTISRDNSKNTLYLQMNSLRAEDTAVYYCARVNSGSYYSYFDYWGQGTLVTVSS

SEQ ID NO: 429 - protein, 123 aa, Homo sapiens
QVQLQESGPGLVKPSGTLSLTCAVSGGSISSSNWWSWVRQPPGKGLEWIGEIYHSGSTNYNPSLKSRVTISVDKSKNQFSLKLNSVTAADTAVYYCASRWGDYFDSSGAYDSWGQGTLLTVSS

SEQ ID NO: 430 - protein, 118 aa, Homo sapiens
QVQLVESGGGVVQPGKSLRLSCAASGFTFSSYGMHWVRQAPGKGLEWVAVIWYDGNNKFYVDSVKGRFTISRDNSKNTLYMEMNSLRAEDTAVYYCARKGPLWRFDYWGQGTLVTVSS

SEQ ID NO: 431 - protein, 112 aa, Homo sapiens; identical to SEQ ID NO: 342

SEQ ID NO: 432 - protein, 127 aa, Homo sapiens
QLQLQESGPGLVKPSETLSLTCTVSGGSISSSSYYWGWIRQPPGKGLEWIGSVYYIGSTYYNPSLKSRVTMSVDTSKNQFSLKLSSVTAADTAVYYCARAPFQLLDKYYFFYYMDVWGKGTTVTVSS

SEQ ID NO: 433 - protein, 116 aa, Homo sapiens
EVQLVESGGDLIQPGGSLRLSCAASGLTVSSNYMSWVRQAPGKGLEWVSIIYSGGSTYYADSVKGRFSISRDNSNNTLYLQMNSLRAEDTAVYFCARHIPAWGYKWGQGTLVTVSS

SEQ ID NO: 434 - protein, 124 aa, Homo sapiens
EVQLLESGGGLVQPGGSLRLSCAASGFTFTSYGMSWVRQAPGKGLEWVSAISISGGSTYYADSVKGRFTISRDNSKNTLYLQMNSLRAEDTAVYYCAKLLGSGITLDNDAFDIWGQGTMVTVSS

SEQ ID NO: 435 - protein, 122 aa, Homo sapiens; identical to SEQ ID NO: 313

SEQ ID NO: 436 - protein, 123 aa, Homo sapiens
EVQLLESGGGLVQPGGSLRLSCAASGFTFTSYAMNWVRQAPGKGLEWVSAISVSGGSTYYADSVKGRFTISRDNSKNTLYLQMNSLRAEDTAVYYCAKDFGSGIVGATGFDFWGQGTLVTVSS

SEQ ID NO: 437 - protein, 129 aa, Homo sapiens; identical to SEQ ID NO: 315

SEQ ID NO: 438 - protein, 121 aa, Homo sapiens; identical to SEQ ID NO: 338

SEQ ID NO: 439 - protein, 124 aa, Homo sapiens
QVQLVESGGGVVQPGRSLRLSCATSGFTFSSFALHWVRQAPGKGLEWVTVISDDGNNKYYVDSVKGRFTISRDNSKNTLFLQMNSLRVEDTAIYYCARASYNSNWSIGEYFRDWGQGTLVTVSS

SEQ ID NO: 440 - protein, 127 aa, Homo sapiens
QVQLVESGGGVVQPGRSLRLSCAASGFTFSTYGMHWVRQAPGKGLEWVAVILYDGSNRYYADSVKGRFTISRDNSKNTLYLQMNSLRAEDTAVYYCAKQGGLYCSGTNCWGGYLDYWGQGTLVTVSS

SEQ ID NO: 441 - protein, 119 aa, Homo sapiens
QITLKESGPTLVKPTQTLTLTCTVSGFSLSTSGVGVGCIRQPPGKALEWLALIYWDDDKRYSPSLKSRLTITRDTSKNQVVLTMTNMDPVDTGTYFCVHRHVSGAFDYWGQGTLVTVSS

SEQ ID NO: 442 - protein, 131 aa, Homo sapiens
QVQLVQSGSELKKPGASVKVSCKASGYTFTSYAMNWVRQAPGQGLEWMGWINTNTGNPTYAQGFTGRFVFSLDTSVNTAYLQISSLKAEDTAVYYCARARLLGYCSSTSCYTIGWGAFDIWGQGTMVTVSS

SEQ ID NO: 443 - protein, 118 aa, Homo sapiens
QVQLVESGGGVVQPGRSLRLSCAASGFTFSSYGMHWVRQAPGKGLEWVAVIWYDGSNKYYADSVKGRFTISRDNSKNTLYLQMNSLRAEDTAVYYCAREGQGTYLDYWGQGTLVTVSS

SEQ ID NO: 444 - protein, 126 aa, Homo sapiens; identical to SEQ ID NO: 322

SEQ ID NO: 445 - protein, 122 aa, Homo sapiens
QVQLVESGGGVVQPGRSLRLSCAASGFTFSRHAMHWVRQAPGKGLEWVAVISYDGSNKYYADSVKGRFAISRDNSKNTLYLQMNSLRPEDTAVYYCARDPSPLVLITSIDYWGQGTLVTVSS

SEQ ID NO: 446 - protein, 123 aa, Homo sapiens
QLQLQESGPGLVKPSETLSLTCTVSGGSISSGTYYCGWIRQPPGKGLEWIGSTYYGGSTLYNPSLRGRVTISVDTSKNQFSLKLSSVTAADTAVYYCARRGNYYDSKNWFDPWGQGTLVTVSS

SEQ ID NO: 447 - protein, 121 aa, Homo sapiens; identical to SEQ ID NO: 309

SEQ ID NO: 448 - protein, 122 aa, Homo sapiens
EVQLVESGGGLVQPGGSLRLSCAASGFTFSSSDLHWVRQATGKGLEWVSAIGTAGDTYYLGSVKGRFTISRENGKNSLYLQMNSLRAGDTAVYYCARVLYDSSGFYNWFDPWGQGTLVTVSS

SEQ ID NO: 449 - protein, 126 aa, Homo sapiens
QVQLQESGPGLVKPSQTLSLTCTVSGGSISSGGYYWSWIRQHPGKGLEWIGYISYSGSTYYNPSLKSRLTISVDTSKNQFSLKLSSVTAADTAVYYCARDLGDGYNLRVPAYFDLWGRGTLVTVSS

SEQ ID NO: 450 - protein, 118 aa, Homo sapiens
QVQLQESGPGLVKPSGTLSLTCAVSGGSISSSNWWSWVRQPPGKGLEWIGEIYHGGSTDYNPSLKSRVTISVDKSKNQFSLKLTSVTAADTAVYYCARVDHVNVRDYWGPGTLVTVSS

SEQ ID NO: 451 - protein, 128 aa, Homo sapiens; identical to SEQ ID NO: 331

SEQ ID NO: 452 - protein, 121 aa, Homo sapiens
QVQLVESGGGVVQPGRSLRLSCAASGFTFSNYGMHWVRQAPGKGLEWVAVIYYDGSNKYYADSVKGRFTISRDNSKNTLYLQIHSLRAEDTAVYYCAREGQMAATTGIDYWGQGTLVTVSS

SEQ ID NO: 453 - protein, 128 aa, Homo sapiens
EVQLVESGGGLVKPGGSLRLSCAASGFTFSNAWMSWVRQAPGKGLEWVGRIKGKTDGGTTDYAAPVKGRFTISKDDSKNTLYLQMSSLNTEDTAVYWCTTLTYYYDSSAYLNDAFDIWGQGTMVTVSS

SEQ ID NO: 454 - protein, 121 aa, Homo sapiens
EVQLVESGGGLVQPGRSLRLSCAASGFTFDDYAMHWVRQAPGKGLEWVSGISWNSDNIGYADSVKGRFTISRDIAKNSLYLQMNSLRAEDTALYYCAKGIYYDIFMPLLDWGRGTLVTVSS

SEQ ID NO: 455 - protein, 121 aa, Homo sapiens
QVQLVQSGAEVKKPGSSVKVSCKTSGDTSSSYTVGWVRQAPGQGLEWMGRIIPILGIAYSAQKFQGRLTITADKSTSTSYMELSSLRSEDTAVYYCARGVVAATPGWFDPWGQGTLVTVSS

SEQ ID NO: 456 - protein, 124 aa, Homo sapiens
QVQLVQSGAEVKKPGSSVKVSCKASGGTFGSYVISWVRQAPGQGLQWMGGIIPIFGKPNYAQKFQGRVTITADESTSTAYMELSSLRSEDTAVYYCARGWFGELLKGTYWFDPWGQGTLVTVSS

SEQ ID NO: 457 - protein, 125 aa, Homo sapiens; identical to SEQ ID NO: 285

SEQ ID NO: 458 - protein, 120 aa, Homo sapiens
EVQLVESGGGLVQPGGSLRLSCAVSGFTFSSYWMHWVRQAPGKGLVWVSRINSDGSSTSYADSVKGRFTISRDNAKNTLYLQMNSLRAEDTAVYYCAREVEQLAHMVDYWGQGTLVTVSS

SEQ ID NO: 459 - protein, 123 aa, Homo sapiens
QLQLQESGPGLVKPSETLSLTCTVSGGSISSTTYYWGWIRQPPGKGLEWIASIYYSGSTYYNPSLKSRLTVSVDTSKNQFSLKLSSVTAADTAVYYCARQWKWFGEAWYFDLWGRGTLVTVSS

SEQ ID NO: 460 - protein, 124 aa, Homo sapiens
EVQLVESGGGLVQPGGSLRLSCAASGFTFSSYWMNWVRQAPGKGLEWVANINQDGGEKYYVDSVRGRFTISRDNAKNSLYLQMNSLRAEDTAVYYCARDPYDLYGDYGGTFDYWGQGTLVTVSS

SEQ ID NO: 461 - protein, 129 aa, Homo sapiens
QVQLVQSGAAVKKPGSSVKVSCKASGGTFSSYAISWVRQAPGQGLEWMGGIVPIFGTANYAQKFQGRVTITADESTTTAYMELNSLRSEDTAVYYCAREDYYGSGSLVDPYYYYRMDVWGQGTTVTVSS

SEQ ID NO: 462 - protein, 122 aa, Homo sapiens
QVQLVESGGGVVQPGRSLRLSCAASGFTFSNYGMHWVRQAPGKGLEWVAVIWYDGSNKYYADSVKGRFTISRDNSKNTLYLQMNSLRAEDTAVYYCVRDLALFEVVIQQGVWGQGTLVTVSS

SEQ ID NO: 463 - protein, 127 aa, Homo sapiens
QLQLQESGPGLVKPSETLSLTCTVSGGSVSSRSYYWGWIRQPPGKGLEWIGSIYYSGSTYYNPSLKSRVTISVDTSKNQFSLKLSSVTAADTAVYYCARHTVDCGGDCFPNDAFDIWGQGTMVTVSS

SEQ ID NO: 464 - protein, 130 aa, Homo sapiens; identical to SEQ ID NO: 277

SEQ ID NO: 465 - protein, 121 aa, Homo sapiens
QVQLVESGGGVVQPGRSLRLSCAASGFIFSTYAMHWVRQAPGKGLEWVAVISYDGDNKYYADSVKGRFTISRDNSKNTLYLEMNSLRAEDTAVYYCARPRGGSYQTCFDYWGQGTLVTVSS

SEQ ID NO: 466 - protein, 122 aa, Homo sapiens
QVQLVQSGSELKKPGASVKVSCKASGYTFTSHTMNWVRQAPGQGLEWMGWINTNTGNPMYAQGFTGRFVFSLDTSGSTAYLQISSLKAEDTAVYYCARWGPDYGDYASNDYWGQGTLVTVSS

SEQ ID NO: 467 - protein, 129 aa, Homo sapiens; identical to SEQ ID NO: 289

SEQ ID NO: 468 - protein, 117 aa, Homo sapiens
QVQLVQSGSELKKPGASVKVSCKASGYTFTTYAMNWVRQAPGQGLEWMGWINTNTGNPTYAQDFTGRFVFSLDTSVSTAYLQISSLKAEDTAVYYCARGLVGRIDPWGQGTLVTVSS

SEQ ID NO: 469 - protein, 122 aa, Homo sapiens
QVQLVQSGAEVKKPGASVKVSCKASGYTFTNYYMHWVRQAPGQGLEWMGILNPGAGSTSYAQKFQGRVTMTSDTSTNTVYMQLSSLKSEDTAVYYCARDQQIVPHADGFDIWGQGTMVTVSS

SEQ ID NO: 470 - protein, 119 aa, Homo sapiens; identical to SEQ ID NO: 308

SEQ ID NO: 471 - protein, 121 aa, Homo sapiens; identical to SEQ ID NO: 291

SEQ ID NO: 472 - protein, 129 aa, Homo sapiens
EVQLVESGGGLVQPGGSLRLSCAASGFTFSSYWMSWVRQAPGKGLEWVANIKEDGSEKYYVDSVKGRFTISRDNAKNSLYLQMNSLRAEDTAVYYCARDVGGYSGYDLGFDYYYYMDVWGKGTTVTVSS

SEQ ID NO: 473 - protein, 126 aa, Homo sapiens
QVQLVESGGGVVQPGRSLRLACAASGFTFSSYGMHWVRQAPGKGLEWVAVISYDGNNKYYADSLKGRFTISRDDSKNTLYLQMNSLRAEDTAVYYCAKDRTAVFLFFGLGDAFDIWGQGTMVTVSS

SEQ ID NO: 474 - protein, 121 aa, Homo sapiens; identical to SEQ ID NO: 329

SEQ ID NO: 475 - protein, 123 aa, Homo sapiens
EVRLLESGGGLVQPGGSLRLSCAASGFTFTSYAMSWVRQAPGKGLQWVSTISVSGGSTYYADSVKGRFTISRDNSKNTLYLQMNSLRAEDTAVYYCAKDPASGIVGPTHFDYWGQGTLVTVSS

SEQ ID NO: 476 - protein, 121 aa, Homo sapiens; identical to SEQ ID NO: 327

SEQ ID NO: 477 - protein, 127 aa, Homo sapiens
QVQLQESGPGLVKPSQTLSLTCTVSGGSISSGDYYWSWIRQPPGKGLEWIGYIYYSGSTYYNPSLKSRVTISVDTSKNQVSLKLSSVTAADTAVYYCARFRRSYGSGSYYNISFDYWGQGTLVTVSS

SEQ ID NO: 478 - protein, 119 aa, Homo sapiens
QVQLVQSGSELKKPGASVKVSCKASGYTFTRHAMNWVRQAPGQGLEWMGWINTNTGNPTYAQGFTGRFVFSLDTSVSTAYLQISSLKAEDTAVYYCVREYGSGHPLPIWGQGTLVTVSS

SEQ ID NO: 479 - protein, 118 aa, Homo sapiens
QVQLQESGPGLVKPSETLSLTCSVSGGSIRSYFWNWVRQPPGKGLEWIGYIYYSGSTNYKPSFKSRVTISLDTSKNQISLKLSSVTAADTAVYYCARATWLRDAFGIWGQGTMVTVSS

SEQ ID NO: 480 - protein, 123 aa, Homo sapiens
QVQLVQSGAEVKKPGASVRVSCKAPGYTFTTYYIHWVRQAPGQGLEWMGIINPSAGSTTYAQKFQGRVTMTRDTSTSTVYMELSSLRSEDTAVYYCARGFHVPAALRNWFDPWGQGTLVTVSS

SEQ ID NO: 481 - protein, 125 aa, Homo sapiens
QVQLQESGPGLVKPSQTLSLTCTVSGGSISSGGYYWSWIRQHPGKGLEWIGYIYYSGSTYYNPSLKSRVTISVDTSKNQFSLKLTSVTAADTAVYYCAREANDSGSFYNGPFDYWGQGTLVTVSS

SEQ ID NO: 482 - protein, 125 aa, Homo sapiens
QVQLQESGPGLVKPSQTLSLTCTVSGGSISSGSYYWSWIRQPAGKGLEWIGRIFTSGSTNYNPSLKSRVTISVDTSKNQFSLKLSSVTAADTAVYYCARGGLLWFGGAGNYMDVWGKGTTVTVSS

SEQ ID NO: 483 - protein, 123 aa, Homo sapiens
QVQLAQSGAEVKKPGASVKVSCKAGGYTFTSYDINWVRQATGQGLEWMGWMNSNSGNAGYAQKFQGRVTMTRDTSISTAYMELSSLRSEDTAVYYCARMRTGWPTHGRPDDFWGRGTLVTVSS

SEQ ID NO: 484 - protein, 124 aa, Homo sapiens
QVQIQQWGAGVLKPSETLSLTCAVYGGSFSGHYWSWIRQPPGKGLEWIGEINHSGSTKYNPSLKSRVTISVDTSKNQFSLKLSSVTAADTAVYYCARGPPVTTFFVFSLLFDPWGQGTLVTVSS

SEQ ID NO: 485 - protein, 122 aa, Homo sapiens
QVQLVESGGGVVQPGRSLRLSCAASGFTFSSYGMHWVRQAPGKGLEWVAVISYDGRNKYYADSVKGRFTISRDNSKNTLYLQMSSLRAEDTAVYYCAKEGEWELRGNALDIWGQGTMVTVSS

SEQ ID NO: 486 - protein, 120 aa, Homo sapiens
QVQLVESGGGVVQPGRSLRLSCAASGFTFSSYGMHWVRQAPDKGLEWVAVIWYDGSNKYYADSVKGRFTISRDNSKNTLYLQMNSLRAEDTAVYYCAREGQWPNQAFDIWGQGTMVTVSS

SEQ ID NO: 487 - protein, 124 aa, Homo sapiens
QVQLQESGPGLVKPSETLSLTCTVSGGSISSSSYYWGWIRQPPGKGLEWIGSIYYSGSSYYSPSLKSRVTISADTSKNQFSLNLRSVTAADTAVYYCASGPPYMATFSYYFDYWGQGTLVTVSS

SEQ ID NO: 488 - protein, 124 aa, Homo sapiens
QVQLVESGGGLVKPGGSLRLSCAASGFTFSDYYMSWIRQAPGKGLECVSYISSSGSTIYYADSVKGRFTISRDNAKNSLYLQMNSLRAEDTAVYYCARDPIRDGVWGLNENDYWGQGTLVTVSS

SEQ ID NO: 489 - protein, 125 aa, Homo sapiens
QVQLVESGGGVVQPGRSLRLSCAASGFIFSSYAMHWVRQAPGKGLEWVAVISYDGSNKYYADSVKGRFTISRDNSKNTLYLQMNSLRAEDTAVYYCARSPPASYYNPSTGYFDYWGQGTLVTVSS

SEQ ID NO: 490 - protein, 122 aa, Homo sapiens
QVQLVQSGAEVKKPGASVKVSCKASGYTFTSHYMHWVRQAPGQGLEWMGIINPSGGSTSYAQKFQGRVTMTSDTSTSTVYMELSSLRSEDTAMYYCARDVFWVPAASSFDYWGQGTLVTVSS

SEQ ID NO: 491 - protein, 122 aa, Homo sapiens; identical to SEQ ID NO: 330

SEQ ID NO: 492 - protein, 123 aa, Homo sapiens; identical to SEQ ID NO: 281

SEQ ID NO: 493 - protein, 125 aa, Homo sapiens
QVQLQQWGAGLLKPSETLSLTCAVYGGSFSGYYWSWIRQPPGKGLEWIGEINHSGSSNYNPSLKSRVTISVDTSKNQFSLKLSSVTAADTAVYYCARGWGWGAVAGRAEYYFDYWGQGTLVTVSS

SEQ ID NO: 494 - protein, 121 aa, Homo sapiens
QVQLVESGGGVVQPGRSLRLSCAASGFTFSSYAMHWVRQAPGKGLEWVAVISYDGYNKYYADSVKGRFTISRDNSKNTLYLQMNSLRAEDTAVYYCARAQGGNYYYGMDVWGQGTTVTVSS

SEQ ID NO: 495 - protein, 119 aa, Homo sapiens
QVQLQESGPGLVKPSQTLSLTCTVSGGSISSGSYYWSWIRQPAGKGLEWIGRVYIYSSGSTNYNPSLKSRVTISVDTSKNQFSLKLSSVTAADTAVYYCARGAASFDYWGQGTLVTVSS

SEQ ID NO: 496 - protein, 126 aa, Homo sapiens
QLQLQESGPGLVKPSETLSLTCTVSGGSISSSSNYWGWIRQPPGKGLEWIGSIYYSGSTYYNPSLKSRVTISVDTSKNQFSLKLSSVTAADTAVYYCARDPRVVVTARMYNWFDPWGQGTLVTVSS

SEQ ID NO: 497 - protein, 128 aa, Homo sapiens
QVQLQESGPGLVKPSETLSLTCTVSGGSLSSYYWSWIRQPPGKGLEWIGYIYDSGGASRSTNYNPSLKSRVTISVDTSRNQLSLKLSSVTAADTAVYYCARDQRQFQLLGRFGWFDPWGQGTLVTVSS

SEQ ID NO: 498 - protein, 123 aa, Homo sapiens; identical to SEQ ID NO: 459

SEQ ID NO: 499 - protein, 125 aa, Homo sapiens
QVQLVQSGSELKKPGASVKVSCKASGYTFTTYAMNWVRQAPGQGLEWMGWINTNTGNPTYAQGFTGRFVFSLDTSVNTAFLHIGSLKAEDTAVYYCARDQDSGYPTYYYYYMDVWGKGTTVTVSS

SEQ ID NO: 500 - protein, 128 aa, Homo sapiens
QVQLVQSGAEVKKPGASVKVSCKASGYTFTSYDMNWVRQATGQGLEWMGWMNPNSGNTGYAQKFQGRVTMTRNTSISTAYMELSSLRSEDTAVYYCARGGIYYLVRGFIIGYYGMDVWGQGTTVTVSS

SEQ ID NO: 501 - protein, 122 aa, Homo sapiens
EVALVESGGGLVKPGGSLRLSCAASGFIFSNAWMTWVRQAPGKGLEWVGRIKSKSEGGTPEYAAPVKGRFIISRDDSTNSLHLQMNYLRIEDTAVYYCTTGGYSSYAASDYWGQGTLVTVSS

SEQ ID NO: 502 - protein, 124 aa, Homo sapiens
EVQLVESGGGLVQPGGSLRLSCAASGFTFSSYSMNWVRQAPGKGLEWVSYISSRSSTIKYADSVKGRFTISRDNAKNSLYLQMNSLRDEDTAVYYCARVDYYGSGSVYWYFDLWGRGTLVTVSS

SEQ ID NO: 503 - protein, 121 aa, Homo sapiens
EVQLVESGGGLVQPGRSLRLSCAASGFTFDDYAMHWVRQAPGKGLEWVSGISWNSGSIAYADSVKGRFTISRDNAKNSLYLQMNSLRAEDTALYFCAKVGWELSIDAFDLWGQGTMVTVSS

SEQ ID NO: 504 - protein, 120 aa, Homo sapiens; identical to SEQ ID NO: 317

SEQ ID NO: 505 - protein, 120 aa, Homo sapiens
QVTLRESGPALVKPTQTLTLTCTFSGFSLSTSGMCVSWIRQPPGKALEWLARIDWDDDKYYSTSLETRLTISKDTSKNQVVLTMTNMDPVDTATYYCARIQYQLNGMDVWGQGTTVTVSS

SEQ ID NO: 506 - protein, 130 aa, Homo sapiens
QVQLVQSGAEVKKPGASVKVSCKASGYTFSSYDINWVRQATGQGLEWMGWVNPNSGHTGYAQKFQGRVTMTRNTSVSTAYMELSSLRSEDTAVFYCARGRVGYVGSGSRGYYYYYDMDVWGQGTTVTVSS

SEQ ID NO: 507 - protein, 124 aa, Homo sapiens; identical to SEQ ID NO: 326

SEQ ID NO: 508 - protein, 119 aa, Homo sapiens
QVQLVQSGSALKKPGASVKVSCKASGYTFTSYAMNWVRQAPGQGLEWMGWINTNTGNPTYAQGFTGRFVFSLDTSVSTAYLQISSLKAEDTAVYYCARGRSYGLSLGYWGQGTLVTVSS

SEQ ID NO: 509 - protein, 120 aa, Homo sapiens
QVQLVESGGGVVQPGRSLRVSCAASGFTFSSHGMHWVRQAPGKGLEWVSVIWYDGSNKYYADSVKGRFTISRDNSKNTLSLQMNSLRAEDTAVYYCARESADISSRLDYWGRGTLVTVSS

SEQ ID NO: 510 - protein, 120 aa, Homo sapiens; identical to SEQ ID NO: 317

SEQ ID NO: 511 - protein, 123 aa, Homo sapiens
EVQLVESGGGLVQPGGSLRLSCAASGFILSDHYMDWVRQAPGKGLEWVGRTRNKANSYTTEYAASVKGRFTISRDDSKNSLYLQMNSLKTEDTAVYYCASVITFGGVIVRSYWGQGTLVTVSS

SEQ ID NO: 512 - protein, 122 aa, Homo sapiens
QVQLVQSGAEVKKPGSSVKVSCKASGGTFSSYAISWVRQAPGQGLEWMGGIIPVFGTTNYAQKLQGRVTISADESTSTAYMEVSSLRSEDTAVYYCARVSGYGDYGAYSDYWGQGTLVTVSS

SEQ ID NO: 513 - protein, 121 aa, Homo sapiens
EVQLVESGGGLVQPGGSLRLSCVASEFTFSSYWMSWFRQAPGKGLEWVSGINWNGGSTGYADSVKGRFTISRDNAKNSLYLQMNSLKTEDTAVYYCASVITFGGVIVRSYWGQGTLVTVSS

SEQ ID NO: 514 - protein, 128 aa, Homo sapiens; identical to SEQ ID NO: 381

SEQ ID NO: 515 - protein, 121 aa, Homo sapiens; identical to SEQ ID NO: 319

SEQ ID NO: 516 - protein, 120 aa, Homo sapiens
QVQLVESGGGVVQPGRSLRLSCAASGFTFSSYLMHWVRQAPGKGLEWVAVIWANGNRYYADSVKGRFTISRDISKNTLYLQMNSLRAEDTAMYYCARDYCNGVTCNSNYWGQGTLVTVSS

SEQ ID NO: 517 - protein, 115 aa, Homo sapiens
QVQLQESGPGLVKPSGTLSLTCAVSGGSISSSNWWSWVRQPPGKGLEWIGEIYHSGSTNYNPSLKSRVTISVDKSKNQFSLKLSSVTAADTAVYYCARGWYFDYWGQGTLVTVSA

SEQ ID NO: 518 - protein, 124 aa, Homo sapiens
QVQLVQSGAEVKKPGSSVKVSCKASGGTFHNYAISWVRQAPGQGLEWMGGFIPILGTTNYAQKFQGRVTITADESTSTAYMELSSLRSEDTAVYYCARVEGEGVDSYYYGMDVWGQGTTVTVSS

SEQ ID NO: 519 - protein, 121 aa, Homo sapiens; identical to SEQ ID NO: 291

SEQ ID NO: 520 - protein, 123 aa, Homo sapiens
QLQVVQSGPGLVKPSETLSLTCTVSGDPVINTNYYWGWIRQPPGKGLEWIGTLSYSGGTHYNPSLSSRVTIAVDSSKKRFSLTLRSVTAADTAIYYCARHPVDGYNYGYSDLWGQGTLVTVSS

SEQ ID NO: 521 - protein, 130 aa, Homo sapiens; identical to SEQ ID NO: 277

SEQ ID NO: 522 - protein, 121 aa, Homo sapiens
QVQLVESGGGVVQPGRSLRLSCAASGFTFSSYAMHWVRQAPGKGLEWVAVISYDEINKYYADSVKGRFTISRDNSKTTLDLQMNSLRAEDTAVYYCARAGGGSYRGPFDYWGQGTLVTVSS

SEQ ID NO: 523 - protein, 121 aa, Homo sapiens
QVQLVESGGGVVQPGRSLRLSCAASGFTFSTYAMHWVRQAPGKGLEWVTVISYDGSNKYYADSVKGRFTISRDNSKNTLYLQMNSLRAEDTAVYYCAKSYNGNYYDAFDIWGQGTMVTVSS

SEQ ID NO: 524 - protein, 121 aa, Homo sapiens
QVQLVESGGGVVQPGRSLRLSCAASGFTFSSYGMHWVRQAPGKGLEWVAVISYDGSNKYYADSVKGRFTISRDNAKNSLYLQMNSLRAEDTAVYYCARGSAGNYYYGMDVWGQGTTVTVSS

SEQ ID NO: 525 - protein, 127 aa, Homo sapiens
EVQLVQSGAEVKKPGESLKISCKGSGYSFSDYWIGWVRQMPGKGLEWMGIIYPGDSDTRYSPSFQGQVTISADKSISTAYLQWSSLKASDTAMYYCARLTFGGSGSYYFYYNGMDVWGQGTTVTVSS

SEQ ID NO: 526 - protein, 125 aa, Homo sapiens
EVQLVESGGGLVQPGGSLRLSCAASGFTFSSYDMHWVRQATGKGLEWVSAIGTAGDTYYPGSVKGRFTISRENAKNSLYLQMNSLRAGDTAVYYCARADPYQLLGQHYYYGMDVWGQGTTVTVSS

SEQ ID NO: 527 - protein, 127 aa, Homo sapiens; identical to SEQ ID NO: 324

SEQ ID NO: 528 - protein, 126 aa, Homo sapiens; identical to SEQ ID NO: 351

SEQ ID NO: 529 - protein, 121 aa, Homo sapiens
QVQLVESGGGVVQPGRSLRLSCAASGFTFSIYGMHWVRQAPGKGLEWVAVISFDGSNKYYADSVKGRFTISRDNSKNTLYLQMNSLRAEDTAVYYCAKDGSGSYYGWFDPWGQGTLVTVSS

SEQ ID NO: 530 - protein, 121 aa, Homo sapiens
QVQLVQSGAEVKKPGSSVKVSCKASGGTFSSYAINWVRQAPGQGLEWMGGIIPIFGTANYAQKFQGRVTFTADESTSTAYMEVSSLRSEDTAVYYCARSCGDCYSADLDFWGQGTLVTVSS

SEQ ID NO: 531 - protein, 120 aa, Homo sapiens
QLQLQESGPGLVKPSETLSLTCTVSGGSISSSSYYWGWIRQPPGKGLEWIGSMYYSGSTYYNPSLKSRVTISVDTSKNQFSLKLSSVTAADTAVYYCARLLWLRGHFDYWGQGTLVTVSS

SEQ ID NO: 532 - protein, 129 aa, Homo sapiens; identical to SEQ ID NO: 287

SEQ ID NO: 533 - protein, 117 aa, Homo sapiens
QVQLVESGGGVVQPGRSLRLSCAASGFTFSFYAIHWVRQAPGQGLEWAAAISSDGTYKYYADSVKGRFTISRDNSKNTSYLQMNSLRAEDTAVYYCARALNKGFDPWGQGTLLTVSS

SEQ ID NO: 534 - protein, 123 aa, Homo sapiens; identical to SEQ ID NO: 284

SEQ ID NO: 535 - protein, 127 aa, Homo sapiens
QVQLVQSGAEVKKPGASVQVSCEASGYTFTTYYMHWVRQAPGQGLEWMGIINPSGGSTTYAQKFQGRVTMTRDTSTSTVYMDLSSLRSEDTAVYYCARDRLGDGSYLGGGYYGMDVWGQGTTVTVSS

SEQ ID NO: 536 - protein, 123 aa, Homo sapiens
QVQLVQSGAEVKKPGASVKVSCQASGYTFTSYDINWVRQATGQGLEWMGWMKSNSGNTGYAQKFQGRVTMTRNTSISTAYMELTSLRSEDTAVYYCARMRSGWPTHGRPDDLWGRGTLVTVSS

SEQ ID NO: 537 - protein, 127 aa, Homo sapiens
QVQLVQSGAEVKRPGSSVKVSCKASGGTFSSYTISWVRQAPGQGLEWMGRIIPILAVANYAQKFQGRVTITADKSTSTAYMELSSLRSEDTAVYYCARDHSGYYDSTSLMSPFFDYWGQGTLVTVSS

SEQ ID NO: 538 - protein, 124 aa, Homo sapiens
QVQLVQSGAEVKKPGASVKVSCKASGYTFTSHYMHWVRQAPGQGLEWMGIINPSGGSTSYAQKFQGRVTMTGDTSTSTVYMELSSLRSEDTAVYYCARDLAGVPAALGCWFDPWGQGTLVTVSS

SEQ ID NO: 539 - protein, 127 aa, Homo sapiens
QVQLVESGGGVVQPGRSLRLSCAASGFTFSTYAMHWVRQAPGKGLEWVAVISYDGGNKYYADSVKGRFTISRDNSKNTLYLQMNSLRAEDTAVYYCAKNLGPYCSGGTCYSLVGDYWGQGTLVTVSS

SEQ ID NO: 540 - protein, 119 aa, Homo sapiens
EVQLVESGGGLVQPGGSLRLSCAASGFTFSSYDMHWVRQATGKGLEWVSAIGTAGDTYYPGSVKGRFTISRENAKNSLYLQMNSLRAGDTAVYYCARARGGYNWNFDYWGQGTLVTVSS

SEQ ID NO: 541 - protein, 120 aa, Homo sapiens
QVQLVESGGGVVQPGRSLRLSCAASGFTFSSYAMHWVRQAPGKGLEWVAVISYDGSYKYFADSVKGRFTISRDNSKNTLYLQMNSLRAEDTAVYYCARDQGTVVTHFDYWGQGTLVTVSS

SEQ ID NO: 542 - protein, 127 aa, Homo sapiens; identical to SEQ ID NO: 288

SEQ ID NO: 543 - protein, 123 aa, Homo sapiens
QVQLVQSGAEVKKPGASVKVSCKASGYTFTSYDINWVRQATGQGLEWMGWMSPNSGNTGYAQKFQGRVTMTRDTSISTAYMELNSLRSEDTAVYYCARMRSGWPTHGRPDDHWGQGTLVTVSS

SEQ ID NO: 544 - protein, 127 aa, Homo sapiens
EVQLVESGGGVVQPGGSLRLSCAASGFTFDDYAMHWVRQAPGKGLEWVSLISGDGGNTYYADSVKGRFTISRDNSKNSLYLQMNSLRTEDTALYYCAKDEMAYPPSHHYYYYYMDVWGKGTTVTVSS

SEQ ID NO: 545 - protein, 123 aa, Homo sapiens
QVQLVQSGAEVKTPGASVKVSCKASGYTFTSYDINWVRQATGQGPEWMGWMNPNSGNTGYAHKFQGRVTMTRNTSISTAYMELSSLRSEDTAVYYCARGPSILTGFYNPLDYWGQGTLVTVSS

SEQ ID NO: 546 - protein, 130 aa, Homo sapiens
QLQLQESGPGLVKPSETLSLTCTVSGGSISSSNYYWGWIRQPPGKGLEWIGTIHYSGISYYNPSLKSRVTISVDTSNNKFSLELSSVTAADTAVYFCARRTYYDLWSAYSSTAYYCMDVWGKGTTVTVSS

SEQ ID NO: 547 - protein, 122 aa, Homo sapiens
QVRLVQSGAEVKKPGSSVKVSCKASGGTFSDYAISWVRQAPGQGLEWMGGIIPIFGTANYAQKFQGRVTITADEFTITAYMELSSLRSEDTAVYYCARLSGSGWLGYAMDVWGQGTTVTVSS

SEQ ID NO: 548 - protein, 117 aa, Homo sapiens
QVQLVESGGGVVQPGRSLRLSCAASGFTFSSYAMHWVRQAPGKGLEWVAVISNDGRNKYYADSVKGRLTISRDNSKNTLYLQMNSLRAEDTAVYYCARPSNWYFDLWGRGTLVTVSS

SEQ ID NO: 549 - protein, 127 aa, Homo sapiens
EVQLVESGGGLVQPGRSLTLSCAASGFTFDDYTMHWVRQAPGKGLEWVSGIDWNGGTIGYADSVKGRFTISRDNAKNSLYLQMNSLRAEDTALYYCAKAGYYAYVWGSYRFEYFDNWGQGTLVTVSS

SEQ ID NO: 550 - protein, 117 aa, Homo sapiens
EVQLVESGGGLVQPGGSLRLSCAASGVTVSSNYMSWVRQAPGKGLEWVSLIYSGGSTFYADSVKGRFTISRHNSKNTLYLQMNSLRPEDTAVYYCARGPEPDAFDIWGQGTMVTVSS

SEQ ID NO: 551 - protein, 122 aa, Homo sapiens; identical to SEQ ID NO: 302

SEQ ID NO: 552 - protein, 127 aa, Homo sapiens
QVQLVESGGGVVQPGRSLRLSCAASGFTFSDYAMHWVRQAPGKGLEWVADISFDGSNKYYADSVKGRFTISRDSSENTLYLQMDSLRADDTAVYYCARDLSTTWYLEMWGPDAFDIWGQGTVVTVSS

SEQ ID NO: 553 - protein, 127 aa, Homo sapiens
QVQLVESGGGVVQPGRSLRLSCAASGFTFRRYGMYWVRQAPGKGLEWVAVISYDGTDKYYTDSVKGRFTISRDNSKNTLYLQMNSLRAEDTAVYYCAKKGGPYCGGGNCYAGYFDYWGQGTLVTVSS

SEQ ID NO: 554 - protein, 122 aa, Homo sapiens; identical to SEQ ID NO: 283

SEQ ID NO: 555 - protein, 127 aa, Homo sapiens
EVQVVESGGGLVQPGRSLRLSCVSSGFIFDDYVMHWVRQRPGKGLEWVAGITYNGGILGYGDSVKGRFIIARDNVRGFLSLQMGDLRTEDTALYYCARDYCSSTTCPAETYYYMDVWGKGTAVTVSS

SEQ ID NO: 556 - protein, 116 aa, Homo sapiens; identical to SEQ ID NO: 297

SEQ ID NO: 557 - protein, 120 aa, Homo sapiens
EVQLVESGGGLVQPGGSLRLSCAASGFTFSSYDMHWVRQATGKGLEWVSTIGTAGDTYYPDSVKGRFTISRENAKNSLFLQMNSLRAGDTAVYYCARVDFDILTGYYSNWGQGTLVTVSS

SEQ ID NO: 558 - protein, 122 aa, Homo sapiens
EAQLLESGGALVQPGGSLRLSCAASGFTFSCCAMGWVRQAPGRGLEWVSSIHDDGVGTFYAVSVKGRFSISRDNSKNTVYLQMNGLRAEDTGVYYCAKWAGPIVMKYYLQYWGQGALVTVSS

SEQ ID NO: 559 - protein, 123 aa, Homo sapiens
EVQLVESGGGLVQPGGSLRLSCAASGFTFSSYDMHWVRQATGKGLEWVSAIGTAGDTYYPDSVKGRFTISRENAKNSLYLQMNSLRAGDTAVYYCARGGDSGYDLGAWYFDLWGRGTLVTVSS

SEQ ID NO: 560 - protein, 119 aa, Homo sapiens
EVQLVQSGAEVKKPGESLKISCKGSGYSFTNYWIGWVRQMPGKGLEWMGIIYPGDSDTRYSPSFQGQVTISADKSISTAYLQWSSLKASDTAMYYCARTPTLYNWFHPWGQGTPVTVSS

SEQ ID NO: 561 - protein, 120 aa, Homo sapiens
QVTLRESGPALVKPTQTLTLTCTFSGFSLSTSGLCVSWIRQPPGKALEWLARIDWDDDKYYNTSLRTRLTISKDTSKNQVVLTMTNMDPVDTATYYCARATTFFYGMDVWGQGTTVTVSS

SEQ ID NO: 562 - protein, 125 aa, Homo sapiens
QLQLQESGPGLVKPSETLSLTCTVSGGSISSSSYYWGWIRQPPGKGLEWIGSIYYSGITYYNPSLKSRVTISVDTSKNQFSLKLSSVTAADTAVYYCARHQRYCSSSSCHVWDYWGQGTLVTVSS

SEQ ID NO: 563 - protein, 121 aa, Homo sapiens; identical to SEQ ID NO: 280

SEQ ID NO: 564 - protein, 122 aa, Homo sapiens; identical to SEQ ID NO: 282

SEQ ID NO: 565 - protein, 129 aa, Homo sapiens
QVQLVESGGGVVQPGRSLRLSCAASGFTFSSYAMHWVRQAPGKGLEWVAVISYDGSNKYYADSVKGRFTISRDNSKNTLYLQMNSLRAEDTAVYYCARDDNSPQGSGWYFYYYYAMDVWGQGTTVTVSS

SEQ ID NO: 566 - protein, 124 aa, Homo sapiens; identical to SEQ ID NO: 307

SEQ ID NO: 567 - protein, 119 aa, Homo sapiens
EVQLVESGGGLVQPGGSLRLSCAASGFTFSSYWMTWVRQAPGKGLEWVANIKQDGSEKYYVDSVKGRFTISRDNAKNSLSLQMNSLRVEDTAVYYCVRLGVSSWYFDYWGQGTLVTVSS

SEQ ID NO: 568 - protein, 133 aa, Homo sapiens
EVQLVESGGDLVQPGGSLRLTCAASGFTFSSHWMTWVRQAPGKGLEWVANIKEDGREKYYVDSVKGRLTISRDNAKNSLYLQMNSLRAEDTAVYYCARVVVEVATNKGIHGVDYYYYYYMDVWGKGTTVTVSS

SEQ ID NO: 569 - protein, 121 aa, Homo sapiens
QVQLQQWGAGLLKPSETLSRTCAVYGASFSNYYWSWIRQPPGKGLEWIGEINHSENTNYNPSLKSRVTISVDTSKNQFSLRLSSVTAADTAVYYCARLRYSSSGGHIFDYWGQGTLVTVSS

SEQ ID NO: 570 - protein, 125 aa, Homo sapiens
QVQLVQSGAEVKKPGSSVKVSCKASGGTFSSYAISWVRQAPGQGLEWMGGIIPIFGTANYAQKFQGRVTITADESTSTAYMELSSLRSEDTAVYYCARGLTGSSAYKDEIYFDYWGQGTLVTVSS

SEQ ID NO: 571 - protein, 127 aa, Homo sapiens
QVQLQESGPGLVKPSETLSLTCTVSGGSISSYYWSWIRQPPGKGLEWIGYIYYSGSTKYNPSLKSRVTISVDTSKNQFSLKLSSVTAADTAVYYCARDGGNAYSSGWYRYYYHMDVWGKGTTVTVSS

SEQ ID NO: 572 - protein, 122 aa, Homo sapiens; identical to SEQ ID NO: 296

SEQ ID NO: 573 - protein, 123 aa, Homo sapiens; identical to SEQ ID NO: 480

SEQ ID NO: 574 - protein, 122 aa, Homo sapiens; identical to SEQ ID NO: 282

SEQ ID NO: 575 - protein, 124 aa, Homo sapiens
EAQLVESGGGLVQPGGSLRLSCEASGFIFSSYWMSWVRQAPGKGLEWVANIKQDGSEKYYVDSVKGRFTISRDNAKNSLYLQMNSLRAEDTAVYYCARVNDGRPNPLEYYFDYWGQGTLVTVSS

SEQ ID NO: 576 - protein, 124 aa, Homo sapiens
QVQLQESGPGLVKPSQTLSLTCTVSGDSISSGRYYWSWIRQHPGKGLEWIGFVYYSGSTYYNPSLKSRVTISVDTSKNQFSLRLSSVTAADTAVYYCARETYSAYEMPPYFDYWGQGTLVTVSS

SEQ ID NO: 577 - protein, 128 aa, Homo sapiens
EVQLVQSGAEVKKPGESLKISCKGSGYSFTSYWIGWVRQMPGKGLEWMGIIQPGDSDTRYSPSFQGQVTMSADKSTSTAYLQWSSLKASDTAMYYCARDLIIESTIAARPGYYGMDVWGQGTTVTVSS

SEQ ID NO: 578 - protein, 119 aa, Homo sapiens
QVHLVQSGAEVKKPGASVKLSCKASGYTFTNYLLHWVRQAPGQGLEWMGNVNPSRGTATYPQKLDDRVTMTSDKSASTIYMELSGLRSEDTAIYYCARERSGTYFFDYWGQGTLLTVSS

SEQ ID NO: 579 - protein, 119 aa, Homo sapiens
QVTLRESGPALVKPTQTLTLTCTFSGFSLTTSGMCVSWIRQPPGKALEWLARIDWDDDKYYSTSLQTRLTISKDTSKNQVVLTMTNMDPVDTATYYCARETPVTAIDYWGQGTLVTVSS

SEQ ID NO: 580 - protein, 123 aa, Homo sapiens
QVQLVQSGAEVKKPGSSVKVSCKASGFTFMSSAVQWVRQARGQRLEWIGWIVIGSGNTNYAQKFQERVTITRDMSTSTAYMELSSLRSEDTAVYYCAAPYCSSISCNDGFDIWGQGTMVTVSS

SEQ ID NO: 581 - protein, 123 aa, Homo sapiens
QVQLVQSGAEVKKPGASVKVSCKVSGYTFTGYVVHWVRQAPGQDLEWMGWINTGYGNTKYSQKFQGRVTISWDTSATTAYMELSNLKSEDKAVYYCASMTRMSEQTYYGMDVWGQGTTVTVSS

SEQ ID NO: 582 - protein, 115 aa, Homo sapiens
QVQLVESGGGVVQPGRSLRLSCAASGFTFSSFAMHWVRQAPGKGLEWVAVISYDGSNKYYADSVKGRFTISRDNSKNTLYLQMNSLRAEDTAAYYCARELMSVGWGQGTLVTVSS

SEQ ID NO: 583 - protein, 123 aa, Homo sapiens
EVQLVESGGGLIQPGGSLRLSCAASGITVSSNYMSWVRQAPGKGLEWVSVIYAGGSTYYADSVKGRFTISRDNSKNTLYLQMNSLRAEDTAVYYCARDALYYNGPGRDGMDVWGQGTTVTVSS

SEQ ID NO: 584 - protein, 123 aa, Homo sapiens; identical to SEQ ID NO: 583

SEQ ID NO: 585 - protein, 126 aa, Homo sapiens
QVQLVESGGGVVQPGRSLRLSCAASGFTFSSYGMHWVRQAPGKGLEWVAVISSDGSNKYYAGSVKGRFTISRDNSKNTLYLQMNSLRAEDTAVYYCAKDMVEPLFSHYYYYGMDVWGQGTTVTVSS

SEQ ID NO: 586 - protein, 123 aa, Homo sapiens; identical to SEQ ID NO: 336

SEQ ID NO: 587 - protein, 128 aa, Homo sapiens
EVQLVESGGGLVQPGGSLRLSCAASGFTFRSYDMHWVRQVTGKGLEWVSTIGTAGDTYYPGSVKGRFTISRENAKNSLYLQMNSLRAGDTAVYYCARVFETKVIRGGRYYYYYYMDVWGKGTTVTVSS

SEQ ID NO: 588 - protein, 122 aa, Homo sapiens
QVQLQQWGAGLLKPSETLSLTCAVYGGSFSGYYWSWIRQPPGKGLEWIGEINHSGSTNYNPSLKSRVTISVDTSKNHFSLKMNSVTAADTAVYYCARCRQMGNFYYYYMDVWGKGTTVTVSS

SEQ ID NO: 589 - protein, 123 aa, Homo sapiens
QVQLQESGPGLVKPSQTLSLTCTVSGDSISSAGYYWSWIRQHPGKGLEWIGYIYYSGRTYYNPSLKSRVTMSVDTSKNQFSLRLRSVTAADTAVYYCARVVPTRGPVAWFDPWGQGTLVTVSS

SEQ ID NO: 590 - protein, 128 aa, Homo sapiens; identical to SEQ ID NO: 339

SEQ ID NO: 591 - protein, 124 aa, Homo sapiens
QVQLVQSGAEVKKPGSSVKVSCKTAGGTSSSYAISWVRQAPGQGLEWMGRIIPILGVAIYAQKFQGRVTITADKSTSTAYMELNSLRSEDTAVYYCTTTQGGDYGDNLYYLDYWGQGTLVTVSS

SEQ ID NO: 592 - protein, 117 aa, Homo sapiens; identical to SEQ ID NO: 550

SEQ ID NO: 593 - protein, 123 aa, Homo sapiens
QVQLVQSGAEVKKPGASVKVSCKASGDTFTTYYIHWVRQAPGQGLEWMGIINPSGGSRSYAQKFQGRISMTSDTSTSTVYMELSSLRSEDTAVYYCARGYGFVPNVLYYFDYWGQGTLVTVST

SEQ ID NO: 594 - protein, 120 aa, Homo sapiens
EVQLVESGGGLVKPGGSLRLSCAASGFTFRDYSMNWVRQAPGKGLEWVSSISSGGSYIYYADSVKGRFTISRDNAKNSLYLQMNSLRAEDTAVYYCARGGSILWWLIDYWGQGTLVTVSS

SEQ ID NO: 595 - protein, 123 aa, Homo sapiens
EVQLLESGGGLVQPGGSLRLSCAASGFTFTSYAMSWVRQAPGKGLEWVSGISISGGSTYYAASVKGRFTISRDNSKNTLYLQMNSLRAEDTAVYYCAKDSRSGIAGVDAFDIWGQGTMVTVSS

SEQ ID NO: 596 - protein, 119 aa, Homo sapiens
EVQLVESGGGLVQPGGSLRLSCAASGLTVSSNYMSWVRQAPGKGLECVSVIYAGGNTYYADSVKGRFTISRDNSKNTLYLQMNSLRAEDTAVYYCARGDGGYYSPFDYWGQGTLVTVSS

SEQ ID NO: 597 - protein, 127 aa, Homo sapiens
QITLKESGPTLVKPTQTLTLTCTFSGFSLSTSGVGVAWIRQPPGKALEWLALIYWDDDKRYSPSLKSRLTITKDTSKNQVVLTMTNMDPVDTATYYCAHRLPTPQLLPSFENWFDPWGQGTLVTVSS

SEQ ID NO: 598 - protein, 116 aa, Homo sapiens
EVQLVESGGGLVQPGGSLRLSCAASGLTVGSNYMNWVRQAPGKGLEWVSVIYSGGSTFYADSVKGRFTISRDNSKNTLYLQLNSLRAEDTAVYYCAREVVGYFDCWGQGTLVTVSS

SEQ ID NO: 599 - protein, 118 aa, Homo sapiens
QVQLQESGPGLVKPSETLSLTCTVSGGSISSYYWSWIRQPPGKGLEWIGHIYYTGSSYYNPSLKSRVTISLDTSKNQFSLKLNSVTAADTAVYYCARLRWLRGGIDFWGQGTLVIVSS

SEQ ID NO: 600 - protein, 123 aa, Homo sapiens
QVQLVQSGAEVKKPGASVKVSCKASGDTFTTYYIHWVRQAPGQGLEWMGIINPSGGSRSYAQKFQGRISMTSDTSTSTVYMELSSLRSEDTAVYYCARGYGFVPNVLYYFDYWGQGILVTVSS

SEQ ID NO: 601 - protein, 121 aa, Homo sapiens
QVELVESGGGVVQPGRSLRLSCAASGFIFSSYAMHWVRQAPGKGLEWVAVISYDGGNKYYADSVKGRFTISRDNSKNTLYLQMNSLRAEDTAVYYCARAQGGNYYYGMDVWGQGTTVTVSS

SEQ ID NO: 602 - protein, 132 aa, Homo sapiens
QVQLVESGGGVVQPGRSLRLSCAASGFTFSRYAMYWVRQAPGKGLEWVALISYDGRNEYYADSVKGRFTISRDNSKNTLYLQMNSLRAGDSAVYYCARDLAYHPYRDYGDDDYYYYYGMDVWGQGTTVTVSS

SEQ ID NO: 603 - protein, 122 aa, Homo sapiens
QVQLVQSGAEVKKPGASVKVSCKASGYTFTSYYMHWVRQAPGQGLEWMGIINPGGGSTTYAQKFQGRVTMTSDTSTSTVYMELSSLRSEDTAMYYCARGAIPPNSRAEIDYWGQGTLVTVSS

SEQ ID NO: 604 - protein, 128 aa, Homo sapiens
QVQLVQSGAEVKKPGASVKVSCKASGYTFTSYYLHWVRQAPGQGLEWMGIINPSGGSTTYAQKFQGRVTMTRDTSTSAVYMELRSLRSEDTAVYYCARENDYGDYVEPRDYYYGMDVWGQGTTVTVSS

SEQ ID NO: 605 - protein, 124 aa, Homo sapiens
QVQLVESGGGVVQPGRSLRLSCAASGFTFSTYGMHWVRQAPGKGLEWVAVIWYDGNKKYCADSVKGRCTISRDNSKNTLYLQMNSLRAEDTAVYYCAREGPFGDREASGAFDVWGQGTMVTVSS

SEQ ID NO: 606 - protein, 120 aa, Homo sapiens
QVQLVESGGGLVKPGGSLRLSCAASGFTFSDYYMSWIRQAPGKGLEWVSYISSSGITIYYADSVKGRFTISRDNAKNSLYLQMNSLRAEDTAVYYCTGVVAAPAEYFQHWGQGTLVTVSS

SEQ ID NO: 607 - protein, 119 aa, Homo sapiens; identical to SEQ ID NO: 293

SEQ ID NO: 608 - protein, 118 aa, Homo sapiens; identical to SEQ ID NO: 337

SEQ ID NO: 609 - protein, 121 aa, Homo sapiens
QVQLVQAGAEVKKPGASVKVSCKASGYTFTSYYMHWVRQAPGQGLEWMGIINPSGGSTSYAQKFQGRVTMTRDTSTSTVYMELSSLRSEDTAVYYCARGAAVPAAGEFDYWGQGTLVTVSS

SEQ ID NO: 610 - protein, 121 aa, Homo sapiens
QVQLVESGGGVVQSGGSLRLSCAASGFTFSTYGMHWVRQAPGKGLEWVAIISYDGINKYYADSVKGRFTISRDNSKNTVYLQMNSLRTEDTAMYYCAKGDGSYLMDYFDYWGQGTLVTVSS

SEQ ID NO: 611 - protein, 122 aa, Homo sapiens; identical to SEQ ID NO: 282

SEQ ID NO: 612 - protein, 122 aa, Homo sapiens
QVQLQQWGAGLLKPSETLSLTCAVYGGSFSGYYWSWIRQPPGKGLEWIGEINHSGSTNYNPSLKSRVTISVDTSKNHFSLKMNSVTAADTAVYYCARCRQMGNFYYYYMDVWGKGTTVTVSP

SEQ ID NO: 613 - protein, 125 aa, Homo sapiens
EVQLVQSGAEVKKPGESLKISCKGSGYSFTSYWVGWVRQMPGKGLEWMGIIYPGDSDTRDSPSFQGQVTISADKSISTAYLQWSSLKASDTAMYYCARLGSESKIDYYYYGMDVWGQGTTVTVSS

SEQ ID NO: 614 - protein, 124 aa, Homo sapiens; identical to SEQ ID NO: 279

SEQ ID NO: 615 - protein, 123 aa, Homo sapiens
QLQLRESGPGLVKPSETLSLTCTVSGGSISSSSYYWGWIRQPPGKGLEWIGSIYYSGSTYYNPSLKSRVTISVDTSKNQFSLKLSSVTAADTAVFYCARMSRGYNYAYTFDIWGQGTMVTVSS

SEQ ID NO: 616 - protein, 120 aa, Homo sapiens
QVTLRESGPALVKPTQTLTLTCTFSGFSLSTSGMCLSWIRQPPGKALEWLARIDWDDDKYYSTSLETRLTISKDTSKNQVVLTMTNMDPVDTGTYYCARTMATINAFDIWGQGTMVTVSS

SEQ ID NO: 617 - protein, 119 aa, Homo sapiens; identical to SEQ ID NO: 320

SEQ ID NO: 618 - protein, 118 aa, Homo sapiens
QVQLVQSGSELKKPGASVKVSCKASEYTFTSYAMNWVRQAPGQGLEWMGWINTNTGNPTYAQGFTGRFVFSLDTSVSTAYLQISSLKAEDTAVYYCARPGKAAAFDYWGQGTLVTVSS

SEQ ID NO: 619 - protein, 128 aa, Homo sapiens
QVQLVESGGGVVQPGRSLRLSCAASGFTFSSYGMHWVRQAPGKGLEWVAVIWYDGSNKYYAESVKGRFTISRDNSKNTLYLQMNSLRAEDTAVYYCARDLHQDWVVVVAANVYGMDVWGQGTTVTVSS

SEQ ID NO: 620 - protein, 123 aa, Homo sapiens; identical to SEQ ID NO: 325

SEQ ID NO: 621 - protein, 120 aa, Homo sapiens
QVTLRESGPALVKPTQTLTLTCTFSGFSLSTSGLCVSWIRQPPGKALEWLARIDWDDDKYYNTSLRTRLTISKDTSKNQVVLTMTNMDPVDTATYYCARATTFFYGMDVWGQGTTATVSS

SEQ ID NO: 622 - protein, 127 aa, Homo sapiens
QVQLVESGGGVVQPGRSLRLSCAASGFTFRRYGMYWVRQAPGKGLEWVAVISYDGTDKYYTDSVKGRFTISRDNSKNTLYLQMNSLRAEDTAVYYCAKKGGPYCGGGNCYAGYFDYWGQGILVTVSS

SEQ ID NO: 623 - protein, 127 aa, Homo sapiens
EVQVVESGGGLVQPGRSLRLSCAASGFTFEDYAMHWVRQAPGKGLEWVSGVSWNSGIIGYADSVKGRFTISRDNAKNSLYLQMNSLRAEDTALYYCAKLDVGGYDFVSGHYYAFDIWGQGTMVTVSS

SEQ ID NO: 624 - protein, 128 aa, Homo sapiens
QVQLVQSGSELKKPGASVKVSCKASGYTFSDYAMNWVRQAPGQGLEWMGWINTNTGNPTYAQGFTGRFVFSLDTSVSTAYLQISSLKAEDTAVYYCARGLISLFRGAIFHYYYGMDVWGQGTTVTVSS

SEQ ID NO: 625 - protein, 117 aa, Homo sapiens; identical to SEQ ID NO: 286

SEQ ID NO: 626 - protein, 127 aa, Homo sapiens
QITLKESGPTLVKPTQTLTLTCTFSGFSLSTKRVGVGWIRQPPGKALEWLALIYWDDDQRYSPSLKSRLTITKDTSKNQVVLTMTNMDPVDTATYYCAHSGPPDLSPVLSQGWFDPWGQGTLVTVSS

SEQ ID NO: 627 - protein, 129 aa, Homo sapiens
QVQLVESGGGVVQPGRSLRLSCAASGFTFVTSGIHWVRQAPGKGLEWVAVISYDGSNKYYADSVKGRFTISRDNSKNTLYLQMNSLRAEDTAVYYCAKGGPNKEVLYFGELLDYGMDVWGQGTTVTVSS

SEQ ID NO: 628 - protein, 117 aa, Homo sapiens; identical to SEQ ID NO: 389

SEQ ID NO: 629 - protein, 123 aa, Homo sapiens; identical to SEQ ID NO: 325

SEQ ID NO: 630 - protein, 122 aa, Homo sapiens; identical to SEQ ID NO: 603

SEQ ID NO: 631 - protein, 127 aa, Homo sapiens; identical to SEQ ID NO: 552

SEQ ID NO: 632 - protein, 122 aa, Homo sapiens; identical to SEQ ID NO: 296

SEQ ID NO: 633 - protein, 127 aa, Homo sapiens; identical to SEQ ID NO: 288

SEQ ID NO: 634 - protein, 123 aa, Homo sapiens
EVQLVQSGPEVKKPGTSVKVSCKASGFTFMSSAVQWVRQARGQRLEWIGWIVIGSGNTNYAQKFQERVTITRDMSTSTAYMELSSLRSEDTAVYYCAAPYCSSISCNDGFDIWGQGTMVTVSS

SEQ ID NO: 635 - protein, 127 aa, Homo sapiens; identical to SEQ ID NO: 544

SEQ ID NO: 636 - protein, 130 aa, Homo sapiens
EVQLVESGGGLVQPGGSLRLSCAASGFTFSSYWMSWVRQAPGKGLEWVANIKQDGSEKYFVDSVKGRFTISRDNAKNSLYLQMNSLRAEDAAVYYCARLVTTVTTANGLYYYSYYYMDVWGKGTTVTVSS

SEQ ID NO: 637 - protein, 121 aa, Homo sapiens
EVQLVESGGGAVQPGRSLRLSCAASGFTFSTYAMYWVRQAPGKGLEWVAVISYDGSNRYYADSVKGRFTISRDNSKNTLYLQMNSLRPEDTAVYYCARDRSGNYRDAFDIWGQGTMVTVSS

SEQ ID NO: 638 - protein, 122 aa, Homo sapiens
HQHQVEQGPGGVEQSETLFLTCCVSGGFTISSCYKRGGIRQPPRKGEEWAVSSYYSSSTYYTPSLKSRVTISVDKSKNQFSLKMSSVTAADTAVYYCARVSSGYYFTPFDYWGQGTRGHRLF

SEQ ID NO: 639 - protein, 121 aa, Homo sapiens
EVQLVESGGGVVQPGRSLRLSCAASGFTFSIYAMHWVRQAPGKGLEWVAVISYDGSNQYYADSVRGRFTISRGNSKNTLYLQMNSLRPEDTAVYYCARARGGSYNDAFDIWGQGTMVTVSS

SEQ ID NO: 640 - protein, 135 aa, Homo sapiens
EVQLVESGGGVVQPGRSLRLSCAASGFTFSSYGMHWVRQAPGKGLEWVAVISYDGSNKYYADSVKGRFTISRDNSKNTLYLQMNSLRAEDTAVYYCAKDGQYYDFWSGYLGARTNPHYYYYMDVWGKGTMVTVSS

SEQ ID NO: 641 - protein, 124 aa, Homo sapiens
EVQLVQSGGGLVQPGRSLRLSCAASGFTFGEYAMHWVRQAPGKGLEWVSGISWNSGSIDYADSVKGRFTISRDNAKNSLYLQMNSLRAEDTALYYCAKDMGEAVAGTHYGMDVWGQGTMVTASS

SEQ ID NO: 642 - protein, 122 aa, Homo sapiens
QVQLVESGAEVKKPGSSVKVSCKASGGTLSSYAITWVRQAPGQGLEWVGGIIPIFGTANYAQKFQGRVTITADESTSTAYMELSSLRSEDTAVYYCARVGAYDSSGYSNDYWGQGTLVTVSS

SEQ ID NO: 643 - protein, 121 aa, Homo sapiens
EVQLVESGGGVVQPGGSLRLSCAASGFTFSSYAMHWVRQAPGKGLEWVAVISYDGSNKYYADSVKGRFTISRDNSKNTLYLQMNSLRAEDTAVYYCAREDYYDSSGSFDYWGQGTLVTVSS

SEQ ID NO: 644 - protein, 122 aa, Homo sapiens
QLQLVESGPGLVKPSETLSLTCTVSGGSISSYFWSWIRQPPGKGLEWIGYIYYSGSTNYNPSLKSRVTISVDTSKNQFSLKLSSVTAADTAVYYCARHSQGWLQQAVAFDIWGQGTMVTVSS

SEQ ID NO: 645 - protein, 127 aa, Homo sapiens
EVQLVESGGGLVQPGGSLRLSCAASGFTVTSTYMTWVRRAPGKGLEWVSIIYNDDTTYYADSVKDRVTVSRDDSKNTLYLQMNSLRAEDTAIYYCARGGYYYDPSGYYSRSFSFDYWGQGTLVTVSS

SEQ ID NO: 646 - protein, 119 aa, Homo sapiens
EVQLVQSGTEVKKPGASVKVSCKASGYTFPGYYIHWVRQAPGQGLEWMGWINPNSGVAKSAQKFQGRVTMTRDSSISTVYLDVTSDDTAVYYCARDLVWATVSGTMDVWGQGTTVTVSS

SEQ ID NO: 647 - protein, 129 aa, Homo sapiens
QVQLVQSGAEVKKPGASVKVSCKASGYTFTSYYMHWVRQAPGQGLEWMGIINSSGGSTSYAQKFQGRVTMTRDTSTSTVYMELSSLRSEDTAVYYCARPPRNYYDRSGYYQRAEYFQHWGQGTLVTVSS

SEQ ID NO: 648 - protein, 118 aa, Homo sapiens
EVQLVESGGGLVQPGGSLRLSCAASGFTVSSNYMSWVRQAPGKGLEWVSVIYSGGSTYYADSVKGRFTISRDNSKNTLYLQMNSLRAEDTAVYYCARVEWAAAGTFYWGQGTLVTVSS

SEQ ID NO: 649 - protein, 127 aa, Homo sapiens
QVQLVESGGGLVKPGGSLRLSCAASGFTFSSYSMNWVRQAPGKGLEWVSSISSSSSFIYYADSVKGRFTISRDNAKNSLYLQMNSLRAEDTAVYYCARWKSDYYDSSGYYPAAFDIWGQRDKWSPSS

SEQ ID NO: 650 - protein, 129 aa, Homo sapiens
QVQLVESGGGLVKPGGSLRLSCAASGFTFSSYSMNWVRQAPGKGLEWVSSISSSSSYIYYADSVKGRFTISRDDAKNSLFLQMNSLRAEDTAVYYCAGDQNLYCSGDSCYYHYYGMDVWGQGTVVTVSS

SEQ ID NO: 651 - protein, 133 aa, Homo sapiens
EVQLVESGGGVVQPGRSLRLSCAASGFTFSSYAMHWVRQAPGKGLEWVAVISYDGSNKYYADSVKGRFTISRDNTKNTLYLQMNSLRAEDTAVYYCARDSEYYDILTGYLAPTHYYYYYMDVWGKGTTVTVSS

SEQ ID NO: 652 - protein, 127 aa, Homo sapiens
EVQLVESGAEVKKPGASVKVSCKASGYTFTSYGISWVRQAPGQGLEWMGWISAYNGYTNSAQKLQGRVTMTTDTSTSTAYMELRSLRSDDTAVYYCARDLVDTAMVQTLDDYGMDVWGQGTMVTVSS

SEQ ID NO: 653 - protein, 122 aa, Homo sapiens
QVQLVQSGAEVKKPGESLKISCKGSGYRFTTYWIGWVRQMPGKGLEWMGIIYPGDSDTRYSPSFQGQVTISADKSISTAYLQWSSLTASDTAIYYCARYYYDSRGYTSIDFWGQGTLVTVSS

SEQ ID NO: 654 - protein, 129 aa, Homo sapiens
EVQLVESGPGLVKPSETLSLTCTVSGGSISSTSYYWGWIRQPPGKGLECIGSIYYSGSTYYNPSLKSRVTISVDTSKNQFSLKLSSVTAADTAVYYCARLNYDFWSGYYSYALYYMDVWGKGTMVTVSS

SEQ ID NO: 655 - protein, 124 aa, Homo sapiens
QLQLQESGPGLVKPSQTLSLTCTVSGGSISSGGYYWSWIRQLPGKGLEWIGYIYYSGSTYYNPSLKSRVTISVDTSKNQFSLNLSSVTAADTAVYYCARQQLDYYDSSGCFDYWGQGTLVTVSS

SEQ ID NO: 656 - protein, 112 aa, Homo sapiens
EVQLVESGPGLVKPSETLSLTCTVSGGSISSYYWSWIRQPPGKRLEWIGYIYYSGSTNYNPSLKSRVTISVDTSKNQFSLKLNSVTAADTAAYYCARGFDYWGQGTRVTVSS

SEQ ID NO: 657 - protein, 120 aa, Homo sapiens
EVQLVESGGGLVQPGGSLRLSCAASGFTFSSYDMHWVRQTTGKGLQWVSAIGTAGDTYYPGSVKGRFTISRENAKNSLYLQMNSLRAGDTAVYYCARGGDRYPVGYFDLWGRGTLVTVSS

SEQ ID NO: 658 - protein, 123 aa, Homo sapiens
VQLQQESGPGLVKPSETLSLTCTVSGGSISSSSYYWGWIRQPPGKGLEWIGSIYYSGSTYYNPSLKSRVTISVDTSKNQFSLKLSSVTAADTAVYYCARRSTSRWGYYYMDVWGKGTRVTVSS

SEQ ID NO: 659 - protein, 125 aa, Homo sapiens
EVQLVESGGGLVQPGGSLRLSCAASGFTFSSYSMNWVRQAPGKGLEWVSYISSSSSTIYYADSVKGRFTISRDNAKNSLYLQMNSLRAEDTAVYYCAREANSDFWSGYLGYFDYWGQGTLVTVSS

SEQ ID NO: 660 - protein, 118 aa, Homo sapiens
QVQLVETGGGLIQPGGSLRLSCAASGFTVSSNYMSWVRQAPGKGLEWVSVIYSGGSTFYADSVKGRFTISRDNSKNTLYLQMNSLRAEDTAVYYCARDLERAGGMDVWGQGTMVTVSS

SEQ ID NO: 661 - protein, 127 aa, Homo sapiens
EVQLLESGAEVKKPGESLKISCKGSGYSFTSYWIGWVRQMPGKGLEWMGIIYPGDSDTRYSPSFQGQVTISADKSISTAYLQWSSLKASDTAMYYCARHMRPSIAARPGYQYYMDVWGKGTRVTVSS

SEQ ID NO: 662 - protein, 115 aa, Homo sapiens
EVQLVETGGGLIQPGGSLRLSCAASGLTVSSNYMNWVRQAPGKGLEWVSVIYSGGSTYYADSVKGRFTISRDNSKNTLYLQMNSLRAEDTAVYYCAREAYGMDVWGQGTMVTVSS

SEQ ID NO: 663 - protein, 125 aa, Homo sapiens
EVQLLESGGGLVQPGGSLKLSCAASGFTFSSYAMSWVRQAPGKGLEWVSAISGSGSNTYYADSVKGRFTISRDNSKNTLYLQMNSLRAEDTAVYYCAKGLRGQQLVIPTEYFQHWGQGTLVTVSS

SEQ ID NO: 664 - protein, 126 aa, Homo sapiens
EVQLVESGAEVKKPGSSVKVSCKASGGTLSSYAISWVRQAPGQGLEWMGGIIPIFGTANYAQKFQGRVTITTDESTSTAYMELSSLRSEDTAVYYCARGPRGCSSTSCYGSYFDYWGQGTLVTVSS

SEQ ID NO: 665 - protein, 127 aa, Homo sapiens
EVQLVESGGGLVKPGGSLRLSCAASGFTFGSYSMSWVRQAPGKGLEWVSSISRSSSYIYNADSVRGRLTISRDNAKNSLYLQMNSLRVEDTAVYYCARDQPLPDILTGYYTGPLDYWGQGTLVTVSS

SEQ ID NO: 666 - protein, 118 aa, Homo sapiens
QVQLVETGGGLIQPGGSLRLSCAASGFTVSSNYMSWVRQAPGKGLEWVSVIYSGGSTYYADSVKGRFTISRDNSKNTLYLQMNSLRAEDTAVYYCARDLDTMGGMDVWGQGTRVTVSS

SEQ ID NO: 667 - protein, 122 aa, Homo sapiens
QVQLVQSGAEVKKPGSSVKVSCKASGGTFSSYAIIWVRQAPGQGLEWMGGIIPIFGTANYAQKFQGRVTITTDESTSTAYMELSSLRSEDTAVYYCARVRYYDSSGYYEDYWGQGTLVTVSS

SEQ ID NO: 668 - protein, 129 aa, Homo sapiens
QVQLLESGGGLVQPGGSLRLSCAASGFTFSSYAMSWVRQAPGKGLEWASAISGSGGSTYYADSVEGRFTISRDNSKNTLYLQMNSLRAEDTAVYYCAKDTGYCGDDCYIKLIRGGPDYWGQGTLVTVSS

SEQ ID NO: 669 - protein, 123 aa, Homo sapiens
QVQLVQSGAEVKKPGATVKISCKVSGYTFTDYYMHWVQQAPGKGLEWMGLVDPEDGETIYAEKFQGRVTITADTSTDTAYMELSSLRSEDTAVYYCASSDSSGFVGSRGFDYWGQGTRVTVSS

SEQ ID NO: 670 - protein, 120 aa, Homo sapiens
QVQLVESGAEVKKPGSSVKVSCKASGGTFSSYGINWVRQAPGQGLEWMGGIIPIFGTANYAQKFQGRVTITTDESTSTAYMELSSLRSEDTAVYYCASFGDDSGDEGVRWGQGTLVTVSS

SEQ ID NO: 671 - protein, 122 aa, Homo sapiens
EVQLVQSGAEVKKPGSSVKVSCKASGGTFSSYAISWVRQAPGQGLEWMGGIIPIFGTTNYAQKFQGRVTITTDESTSTAYMELSSLRSEDTAVYYCARVYSYDSSGYYLEYWGQGTRVTVSS

SEQ ID NO: 672 - protein, 123 aa, Homo sapiens
EVQLVESGGGLIQPGGSLRLSCAASGFTVSSNYMSWVRQAPGKGLEWVSVIYSGGSTYYADSVKGRFTISRDNSKNTLYLQMNSLRAEDTAVYYCASPLLLTPPDYYYYMDVWGKGTMVTVSS

SEQ ID NO: 673 - protein, 117 aa, Homo sapiens
EVQLVESGPGLVKPSETLSLTCTVSGGSISSYYWSWIRQPAGKGLEWIGRIYTSGSTNYNPSLKSRVTMSVDTSKNQFSLKLSSVTAADTAVYYCARWKYNDRFDYWGQGTRVTVSS

SEQ ID NO: 674 - protein, 127 aa, Homo sapiens
EVQLVESGAEVKKPGSSVKVSCKASGGTFSSYAISWVRQAPGQGLEWMGGIIPIFGTANYAQKFQGRVTITTDESTSTAYMELSSLRSEDTAVYYCARGPRYCSSTSCYAGVYFDYWGQGTRVTVSS

SEQ ID NO: 675 - protein, 127 aa, Homo sapiens
EVQLVQSGAEVKKPGESLRISCKGSGYSFTSYWISWVRQMPGKGLEWMGRIDPSDSYTNYSPSFQGHVTISADKSISTAYLQWSSLKASDTAMYYCARPNPAGGYDSSGWVDAFDIWGQGTRVTVSS

SEQ ID NO: 676 - protein, 123 aa, Homo sapiens
EVQLVESGAEVKKPGASVKVSCKVSGYTLPELSMHWVRQTPGKGLEWMGGFDPEDGETIYAQKFQGRVTMTEDTSTDTAYMELSSLRSEDTAVYYCATGPTIAAAATNWFDPGGQGTLVTVSS

SEQ ID NO: 677 - protein, 125 aa, Homo sapiens
EVQLVESGGGLVKPGGSLRLSCAASGFTFSNAWMSWVRQAPGKGLEWVGRIKSKTDGGTTDYAAPVKGRFTISRDDSKNTLYLQMNSLKTEDTAVYYCTTDRGDSYGYYYCMDVWGKGTRVTVSS

SEQ ID NO: 678 - protein, 124 aa, Homo sapiens
EVQLVESGGGVVQPGRSLRLSCAASGFTFSSYGMHWVRQAPGKGLEWVAVIWYDGSNKYYADSVKGRFTISRDNSKNTLYLQMDSLRAEDTAMYYCAKDKAPPCSSGWYYFDYWGQGTLVTVSS

SEQ ID NO: 679 - protein, 125 aa, Homo sapiens
EVQLVESGGGVVQPGRSLRLSCAASGFTFSSYTMHWVRQAPGKGLEWVAVISYDGSNKYYADSVKGRFTISRDNSKNTLYLQMNSLRAEDTAVYYCASLPVVPAAIGPLPAFDIWGQGTMVTVSS

SEQ ID NO: 680 - protein, 128 aa, Homo sapiens
EVQLVESGPGLVKPSQTLSLTCTVSGGSISSGDYYWSWIRQPPGKGLEWIGYIYYSGSTYYNPSLKSRVTISVDTSKNQFSLKLSSVTAADTAVYYCARGVEDPVVPAAIPWCWFDPWGQGTRVTVSS

SEQ ID NO: 681 - protein, 136 aa, Homo sapiens
EVQLVESGVEVKKPGASVKVSCKAFGYTFTGQDMHWVRQAPGQGLEWMGWINPSSAGTNYAQKFQGRVTMTRDTSISTAYMELSRLRSDDTSVYYCRKMLTIFGKVNQTMLLISGAKGQWSPSLQWGQGTMVTVSS

SEQ ID NO: 682 - protein, 122 aa, Homo sapiens
EVQLVESGAEVKKPGSSVKVSCKASGGTFSSYAISWVRQAPGQGLEWMGGIIPIFGTANYAQKFQGRATITTDESTSTAYMELSSLGSEDTAVYYCARTHSYDNSGQYFDYWGQGTMVTVSS

SEQ ID NO: 683 - protein, 127 aa, Homo sapiens
QVQLVQSGAEVKKPGESLRISCKGSGYSFTSHWISWVRQMPGKGLEWMGRIDPSDSYTNYSPSFQGHVTISADKSISTAYLQWSSLKASDTAMYYCARLKVITIFGVVRDDYGMDVWGQGTTVTVSS

SEQ ID NO: 684 - protein, 121 aa, Homo sapiens
QVQLVESGGGVVQPGRSLRLSCAASGFTFSSYAMHWVRQAPGKGLEWVAVISYDGSNKYYADSVKGRFTISRDNSKNTLYLQMNSLRAEDTAVYYCARSASGSYYGAFDYWGQGTLVTVSS

SEQ ID NO: 685 - protein, 121 aa, Homo sapiens
EVQLVESGAEVKKPGASVKVSCKVSGYTLPELSMHWVRQAPGKGLDWMGGFDPEDGETIYAQKFQGRVTMTEDTSTDTAYMELSSLRSEDTAVYYCATSPAVMSVGWVDPWGQGTLVTVSS

SEQ ID NO: 686 - protein, 123 aa, Homo sapiens
QVQLQQSGPGLVKPSETLPLTCTVSGGSISSSSYYWGWIRQPPGKGLEWIGSVFYSGSTYYNPSLKSRVTISVDTSKNQLSLKLSSVTAADTAVYYCARQVRQWLEDDAFDIWGQGTMVTVSS

SEQ ID NO: 687 - protein, 123 aa, Homo sapiens
QVQLVETGGGLIQPGGSLRLSCAASGFTVSSNYMSWVRQAPGKGLEWVSVIYTGGTTYYADSVKGRFTISRDNSKNTLYLQMNSLRAEDTAVYYCARAHVDTAMVESGAFDIWGQGTRVTVSS

SEQ ID NO: 688 - protein, 122 aa, Homo sapiens
QVQLQESGPGLVKPSGTLSLTCAVSGGSISSSNWWSWVRQPPGKGLEWIGEIYHSGSSNYNPSLKSRVTISVDKSKNQFSLKLNSVTAADTAVYYCAGRYCSGGRCGWFDPWGQGTLVTVSS

SEQ ID NO: 689 - protein, 131 aa, Homo sapiens
EVQLVESGGGLVKPGGSLRLSCSASGFTFSNYNMDWVRQAPGKGLEWVSSISSSSSYIYLADSVKGRFTISRDNAKNSLYLQMNSLRAEDTAVYYCARVQKDIVVVPVALADYYYYGMDVWGQGTTVTVSS

SEQ ID NO: 690 - protein, 126 aa, Homo sapiens
QVQLVQPGAEVKKPGASVKVSCKASGYTFTSYGISWVRQAPGQGLEWMGWISAYNGDTNYAQKLQGRVTMTTDTSTSTAYMELRSLKSDDTAVYYCARFDYGYPYSSWSVLSIDYWGQGTLVTVSS

SEQ ID NO: 691 - protein, 122 aa, Homo sapiens
EVQLVESGGGVVQPGRSLRLSCAASGFTFSSYAMHWVRQAPGKGLEWVAVISYDGSYKYYADSVKGRFTISRDNSKNTLYLQMNSLTAEDTAVYYCAREGSRQWLVIYFDYWGQGTLVTVSS

SEQ ID NO: 692 - protein, 131 aa, Homo sapiens
EVQLLESGAEVKKPGASVKISCKASGYTFTGYYMHWVRQAPGQGLEWMGWINPNSGGTNYAQKFQGRVTMTRDTSISTAYMELSRLRSDDTAVYYCARGDGDYYDSSGYYRPTLYNWLDPWGQGTRVTVSS

SEQ ID NO: 693 - protein, 120 aa, Homo sapiens
QVQLQESGPGLVKPSETLSLTCTASGGSISSSSYYWGWIRQPPGKGLEWIGSIYYSGSTYYNPSLKSRVTISVDTSKNQFSLKLSSVTAADTAVYYCARHPSGLYQLLNWGQGTLVTVSS

SEQ ID NO: 694 - protein, 128 aa, Homo sapiens
EVQLVESGGGLVQPGRSLRLSCAASGFTFDDYAMHWVRQAPGKGLEWVSGISWNSGSIGYADSVKGRFTISRDSAKNSLYLQMNSLRAEDTALYYCAKVATYYYDRSGYYYGGALDYWGQGTLVTVSS

SEQ ID NO: 695 - protein, 120 aa, Homo sapiens
EVQLVESGPGLVKPSETLSLTCTVSGGSISSYYWSWIRQPPGKGLEWIGYIYYSGSTNYNPSLKSRVTISVDTSKNQFSLKLSSVTAADTAVYYCARGPAATYYYYMDVWGKGTRVTVSS

SEQ ID NO: 696 - protein, 119 aa, Homo sapiens
EVQLVESGGGLVQPGGSLRLSCAASGFTFSSYAMSWVRQAPGKGLEWVSTISGSGGNTYYADSVKGRFTISRDNSKNTLYLQMNSLRAEDTAVYYCAKEIAVAGCFDYWGQGTLVTVSS

SEQ ID NO: 697 - protein, 129 aa, Homo sapiens
EVQLVESGGGVVQPGRSLRLSCAASGFTFSSYGMHWVRQAPGKGLEWVAVIWYDGSNKYYADSVKGRFTISRDNSKNTLYLQMNSLRAEDTAVYYCARVGSVKSTAGYDFWSGDPFDYWGQGTLVTVSS

SEQ ID NO: 698 - protein, 123 aa, Homo sapiens
QVQLVQSGAEVKKPGASVKVSCKVSGYTLTELSMHWVRQAPGKGLEWMGGFDPEDGETIYAQKFQGRVTMTEDTSTDTAYMELSSLRSEDTAVYYCATAYSVDTAMVRGVGYWGQGTLVTVSS

SEQ ID NO: 699 - protein, 125 aa, Homo sapiens
QVQLVESRAEVKKPGSSVKVSCKASGGTFSSYAISWVRQAPGQGLEWMGRIIPILGITNYAQKFQGRVTITADKSTSTAYMELSSLRSEDTAVYYCARDAPDYYDSSGPTYFDYWGQGTLVTVSS

SEQ ID NO: 700 - protein, 123 aa, Homo sapiens
QVQLVESGGGLVQPGRSLRLSCAASGFTFDDYAMHWVRQAPGKGLEWVSGISWNSGSIGYADSVKGRFTISRDNAKNSLYLQMNSLRAEDTALYYCAKAEPEVGGYDYYMDVWGKGTMVTVSS

SEQ ID NO: 701 - protein, 120 aa, Homo sapiens
EVQLVESGPGLVKPSETLSLTCTVSGGSISSYYWSWIRQPPGKGLEWIGYIYYSGSTNYNPSLKSRVTISVDTSKNQFSLRLSSVTAADTAVYYCARGPAATYYYYMDVWGKGTMVTVSS

SEQ ID NO: 702 - protein, 127 aa, Homo sapiens
EVQLVESGGGLVQPGRSLRLSCAASGFTFDDYAMHWVRQAPGKGLEWVSGISWNSGSIGYADSVKGRFTISRDNAKNSLYLQMNSLRAEDTALYYCAKMGPDPAHDYGRKNDAFDIWGQGTMVTVSS

SEQ ID NO: 703 - protein, 123 aa, Homo sapiens
EVQLVESRAEMKKPGESLKISCKGSGYTFTNHWIAWVRQMPGKGLEWMGIIYPGDSDTRYSPSFEGQVTISADKSISTAYLQWSSLKASDTAMYYCARRGYTYGADFYGLDVWGQGTRVTVSS

SEQ ID NO: 704 - protein, 119 aa, Homo sapiens
QMQLVQSGTEVKKPGESLKISCKGSGYGFITYWIGWVRQMPGKGLEWMGIIYPGDSETRYSPSFQGQVTISADKSINTAYLQWSSLKASDTAIYYCAGGSGISTPMDVWGQGTTVTVSS

SEQ ID NO: 705 - protein, 124 aa, Homo sapiens
QVQLQESGPGLVKPSETLSLTCTVSGYSISSGYYWGWIRQPPGKGLEWIGSIYHSGSTYYNPSLKSRVTISVDTSKNQFSLKLSSVTAADTAVYYCARTPLSLRLRYNWYFDLWGRGTLVTVSS

SEQ ID NO: 706 - protein, 112 aa, Homo sapiens
QVQLQESGPGLVKPSETLSLTCNVSGGSISSYYWSWIRQPPGKGLEWIGYIYYSGSTNYNPSLKSRVTISVDTSKNQFSLKLSSVTAADTAVYYCARGFDYWGQGTLVTVSS

SEQ ID NO: 707 - protein, 118 aa, Homo sapiens
QVQLQESGPGLVKPSQTLSLTCTVSGGSISSGGYYWSWIRQHPGKGLEWIGYIYYSGSTYYNPSLKSRVTISVDTSKNQFSLKLSSVTAADTAVYYCARETTGHFDYWGQGTLVTVSS

SEQ ID NO: 708 - protein, 120 aa, Homo sapiens
QVQLVESGGGVVQPGRSLRLSCAASGFNLSNYAMHWVRQASGKGLEWVSLISYDGSVKYYTDSVKGRFTVSGDNSKNTLFLQMNSLRPDDSALYYCVRGGVSGPNSFDMWGQGTTVTVSS

SEQ ID NO: 709 - protein, 122 aa, Homo sapiens
QVQLVQSGSELKKPGASVKLSCQASGYSFTNHAMNWVRQAPGQGLEWMGWINTNTGNPTYAQGFTGRFVFSLDTSVSTTYLHISSLKAEDTAVYYCARASARPGVATNLDFWGQGTLVVVSS

SEQ ID NO: 710 - protein, 126 aa, Homo sapiens
EVQLVESGGGLVQPGGSLRLSCAASGFTFSSYWMSWVRQAPGKGLEWVANIKQDGSEKYYVDSVKGRFTISRDNAKNSLYLQMNSLRAEDTAVYYCARDFNSYQLLWYYYYGMDVWGQGTTVTVSS

SEQ ID NO: 711 - protein, 125 aa, Homo sapiens
EVQLVQSGAEVKKPGESLKISCKGSGYSFTSYWIGWVRQMPGKGLEWMGIIYPGDSDTRYSPSFQGQVTISADKSISTAYLQWSSLKASDTAMYYCARQSSFYSSGWYSYGMDVWGQGTTVTVSS

SEQ ID NO: 712 - protein, 124 aa, Homo sapiens
QVQLVQSGAEVKKPGASVKVSCKASGYTFTGYYMHWVRQAPGQGLEWMGWINPNSGGTNYAQKFQGRVTMTRDTSISTAYMELSRLRSDDTAVYYCARVDYGSGSYGWGWFDPWGQGTLVTVSS

SEQ ID NO: 713 - protein, 122 aa, Homo sapiens
QVQLVQSGAEVKKPGASVKVSCKVSGYTLTELSMHWVRQAPGKGLEWMGGFDPEDGETIYAQKFQGRVTMTEDTSTDTAYMELSSLRSEDTAVYYCATTSPIVGAITWFDPWGQGTLVTVSS

SEQ ID NO: 714 - protein, 127 aa, Homo sapiens
QVQLVQSGAEVKKPGASVKVSCKASGYTFTGYYMHWVRQAPGQGLEWMGWINPNSGGTNYAQKFQGRVTMTRDTSISTAYMELSRLRSDDTAVYYCAREYYYDSSVYPYYYYAMDVWGQGTTVTVSS

SEQ ID NO: 715 - protein, 119 aa, Homo sapiens
QVQLVESGGGVVQPGRSLRLSCAASGFTFSSYAMHWVRQAPGKGLEWVAVISYDGSNKYYADSVKGRFTISRDNSKNTLYLQMNSLRAEDTAVYYCARVRGSYYLFDYWGQGTLVTVSS

SEQ ID NO: 716 - protein, 127 aa, Homo sapiens
EVQLVESGGGLVKPGGSLRLSCAASGFTFSNAWMSWVRQAPGKGLEWVGRIKSKTDGGTTDYAAPVKGRFTISRDDSKNTLYLQMNSLKTEDTAVYYCTTDRVYDYIWGSYRYLDYWGQGTLVTVSS

SEQ ID NO: 717 - protein, 128 aa, Homo sapiens
EVQLVESGGGLVKPGGSLRLSCAASGFTFSSYSMNWVRQAPGKGLEWVSSISSSSSYIYYADSVKGRFTISRDNAKNSLYLQMNSLRAEDTAVYYCARDRESYDILTGYSMEGCFDYWGQGTLVTVSS

SEQ ID NO: 718 - protein, 126 aa, Homo sapiens
QVQLVQSGAEVKKPGASVKVSCKASGYTFTSYAMHWVRQAPGQRLEWMGWINAGNGNTKYSQKFQGRVTITRDTSASTAYMELSSLRSEDTAVYYCARVWGYCSGGSCYVDAFDIWGQGTMVTVSS

SEQ ID NO: 719 - protein, 122 aa, Homo sapiens
QVQLVQSGAEVKKPGASVKVSCKVSGYTLTELSMHWVRQAPGKGLEWMGGFDPEDGETIYAQKFQGRVTMTEDTSTDTAYMELSSLRSEDTAVYYCATAPPYSPPSSWFDPWGQGTLVTVSS

SEQ ID NO: 720 - protein, 130 aa, Homo sapiens
QVQLQESGPGLVKPSQTLSLTCTVSGGSISSGDYYWSWIRQPPGKGLEWIGYIYYSGSTYYNPSLKSRVTISVDTSKNQFSLKLSSVTAADTAVYYCARDHHYDFWSGYSSYYYYGMDVWGQGTTVTVSS

SEQ ID NO: 721 - protein, 134 aa, Homo sapiens
QVQLVESGGGVVQPGRSLRLSCAASGFTFSSYAMHWVRQAPGKGLEWVAVISYDGSNKYYADSVKGRFTISRDNSKNTLYLQMNSLRAEDTAVYYCARDEAYYDILTGYINAPKNYYYYGMDVWGQGTTVTVSS

SEQ ID NO: 722 - protein, 121 aa, Homo sapiens
QVQLVESGGGVVQPGRSLRLSCAASGFTFSSYAMHWVRQAPGKGLEWVALISYDGSNKYYADSVKGRFTISRDNSKNTLYLQMNSLRAEDTAVYYCARSFGGSYYYGMDVWGQGTTVTVSS

SEQ ID NO: 723 - protein, 122 aa, Homo sapiens; identical to SEQ ID NO: 709

SEQ ID NO: 724 - protein, 118 aa, Homo sapiens
EVQLVESGGGLIQPGGSLRLSCAASGVIVSSNYMSWVRQAPGKGLEWVSVIYSGGSTYYADSVKGRFTISRDNSKNTLYLQMNSLRAEDTAVYYCARDLDVSGGMDVWGQGTTVTVSS

SEQ ID NO: 725 - protein, 122 aa, Homo sapiens; identical to SEQ ID NO: 719

SEQ ID NO: 726 - protein, 122 aa, Homo sapiens
QVQLVQSGAEVKKPGASVKVSCKASGYTFTGYYMHWVRQAPGQGLEWMGWINPNSDVTNYAQKFQGRVTMTRDTSISTAYMELSRLRSDDTAVYYCAREARDYYGSGSLDYWGQGTLVTVSS

SEQ ID NO: 727 - protein, 123 aa, Homo sapiens
QVQLVQSGAEVKKPGASVKVSCKASGYTFTSYDISWVRQAPGQGLEWMGWISAYNGNTNYAQKLQGRVTMTTDTSTSTAYMELRSLRSDDTAVYYCARDSVAGIYYYYGMDVWGQGTTVTVSS

SEQ ID NO: 728 - protein, 121 aa, Homo sapiens
QVQLVESGGGVVQPGRSLRLSCAASGFTFSSYAMHWVRQAPGKGLEWVAVISYDGSNKYYADSVKGRFTISRDNSKNTLYLQMNSLRAEDTAVYYCARSYGGSYYYGMDVWGQGTTVTVSS

SEQ ID NO: 729 - protein, 124 aa, Homo sapiens; identical to SEQ ID NO: 705

SEQ ID NO: 730 - protein, 125 aa, Homo sapiens
QVQLVQSGAEVKKPGASVKVSCKASGYTFTGYYMHWVRQAPGQGLEWMGWINPNSGGTNYVQKFQGRVTMTRDTSISTAYMELNRLRSDDTAVYFCARDLTTTAGTDYYYGMDVWGQGTTVTVSS

SEQ ID NO: 731 - protein, 128 aa, Homo sapiens
QVQLVQSGAEVKKPGASVKVSCKASGYTFTSYGISWVRQAPGQGLEWMGWISAYNGNTNYAQKLQGRVTMTTDTSTSTAYMELRSLRSDDTAVYYCARARVAYDYIWGSYRYKAFDYWGQGTLVTVSS

SEQ ID NO: 732 - protein, 121 aa, Homo sapiens
QVQLVESGGGVVQPGRSLRLSCAASGFTFSSYAMHWVRQAPGKGLEWVAVISYDGSNKYYADSVKGRFTISRDNSKNTLYLQMNSLRAEDTAVYYCARAQTAHYSSSFDYWGQGTLVTVSS

SEQ ID NO: 733 - protein, 120 aa, Homo sapiens
QVQLVESGGGVVQPGRSMRLSCAASGFNLSSYAMHWVRQASGKGLEWVSLISYDGSIKYYADSVKGRFTVSGDNSKNTLFLQMSSLRADDSALYYCVRGGVSGPNAFDIWGQGTTVTVSS

SEQ ID NO: 734 - protein, 121 aa, Homo sapiens
QVQLVESGGGVVQPGRSLRLSCAASGFTFSSYAMHWVRQAPGKGLEWVAVISYDGSNKYYADSVKGRFTISRDNSKNTLYLQMNSLRAEDTAVYYCARSISGSYLGAFDYWGQGTLVTVSS

SEQ ID NO: 735 - protein, 123 aa, Homo sapiens
QVQLVQSGAEVKKPGASVKVSCKASGYTFSSYGISWVRQDPGQGLEWMGWISAYNGNTNYAQKLQGRVTMTTDTSTSTAYMELRSLRSDDTAVYYCARVGLWWLGHPDAFDIWGQGTMVTVSS

SEQ ID NO: 736 - protein, 121 aa, Homo sapiens
QVQLVESGGGVVQPGRSLRLSCAASGFTFSSYAMHWVRQAPGKGLEWVAVISYDGSNKYYADSVKGRFTISRDNSKNTLYLQMNSLRAEDTAVYYCARTKGGSYFAPFDYWGQGTLVTVSS

SEQ ID NO: 737 - protein, 122 aa, Homo sapiens
QVQLVQSGAEVKKPGASVKVSCKASGYTFTSYGISWVRQAPGQGLEWMGWISAYNGNTNYAQKVQGRVTMTTDTSTSTAYMELRSLRSDDTAVYYCARDRGYAATFGVFDYWGQGTLVTVSS

SEQ ID NO: 738 - protein, 117 aa, Homo sapiens
QVQLVESGGGVVQPGRSLRLSCAASGFTFSSYAMHWVRQAPGKGLEWVAVISYDGSNKYYADSVKGRFTISRDNSKNTLYLQMNSLRAEDTAVYYCARVTVVHFDYWGQGTLVTVSS

SEQ ID NO: 739 - protein, 127 aa, Homo sapiens
QVQLVQSGAEVKKPGASVKVSCKASGYTFTSYYMHWVRQAPGQGLEWMGIINPSGGSTSYAQKFQGRVTMTRDTSTSTVYMELSSLRSEDTAVYYCARDLTSTSSSPYSYYYGMDVWGQGTTVTVSS

SEQ ID NO: 740 - protein, 129 aa, Homo sapiens
QVQLVQSGAEVKKPGASVKVSCKASGYTFTSYGISWVRQAPGQGLEWMGWISAYNGNTNYAQKLQGRVTMTTDTSTSTAYMELRSLRSDDTAVYYCARVTVEAIFGVVILPLKNWFDPWGQGTLVTVSS

SEQ ID NO: 741 - protein, 120 aa, Homo sapiens
QVQLVESGGGVVQPGRSLRLSCAASGFNLSNYAMHWVRQASGKGLEWVSLISYDGSIKYYTDSVKGRFTVSGDNSKNTLFLQMNSLRPDDSALYYCVRGGVSGPNSFDMWGQGTTVTVSS

SEQ ID NO: 742 - protein, 123 aa, Homo sapiens
QVQLVQSGAEVKKPGASVKVSCKASGYTFTSYGISWVRQAPGQGLEWMGWISAYSGNTNYAQKLQGRVTMTTDTSTSTAYMEVRSLRSDDTAVYYCARVGLWWLGHPDVFDIWGQGTMVTVSS

SEQ ID NO: 743 - protein, 125 aa, Homo sapiens
QVQLVQSGAEVKKPGSSVKVSCKASGGTFSSYTINWVRQAPGQGLEWMGRIIPILGIADYAQKFQGRVTITADKSTSTAYMELSSLRSEDTAVYYCARDLVEDTAMVTGAAAGTWGQGTLVTVSS

SEQ ID NO: 744 - protein, 124 aa, Homo sapiens
QVQLVQSGAEVKKPGASVKVTCKASGYTFTSYYLHWVRQAPGQGLEWMGIINPSGGTTSYAQKFQGRVTMTRDTSTSTVYMELSSLRSEDTAVYYCARAGRRYSSSDDGAFDIWGQGTMVTVSS

SEQ ID NO: 745 - protein, 124 aa, Homo sapiens
QVQLVESGGGVVQPGRSLRLSCAASGFTFSSYGMHWVRQAPGKGLEWVAVIWYDGSNKYYADSVKGRFTISRDNSKNTLYLQMNSLRAEDTAVYYCARDIMFGDDWLQKQPDYWGQGTLVTVSS

SEQ ID NO: 746 - protein, 121 aa, Homo sapiens; identical to SEQ ID NO: 734

SEQ ID NO: 747 - protein, 132 aa, Homo sapiens
QVQLVQSGAEVKKPGASVKVSCKASGYTFTSYGISWVRQAPGQGLEWMGWISAYNGNTNYAQKLQGRVTMTTDTSTSTAYMELRSLRSDDTAVYYCARLVPTWASYYDFWSGYPGGYGMDVWGQGTTVTVSS

SEQ ID NO: 748 - protein, 125 aa, Homo sapiens
QLQLQESGPGLVKPSETLSLTCTVSGGSISSSSYYWGWIRQPPGKGLEWIGSIYYSGSTYYNPSLKSRVTISVDTSKNQFSLKLSSVTAADTAVYYCATHIVVVTATPNWYFDLWGRGTLVTVSS

SEQ ID NO: 749 - protein, 121 aa, Homo sapiens
EVQLVESGGGVVQPGRSLRLSCAASAFTFSSYDMHWVRQAPGKGLEWVAVISYDGSNKYYADSVKGRFTISRDNSKNTLYLQMNSLRAEDTAVYYCAKDGGKLWVYYFDYWGQGTLVTVSS

SEQ ID NO: 750 - protein, 122 aa, Homo sapiens
QVQLVQSGAEVKKPGASVKVSCKASGYTFTGYYMHWVRQAPGQGLEWMGWINPNSGGTNYTQMFQGRVTMTRDTSISTAYMEVSRLRSDDTAVYYCARDRSWAVVYYYMDVWGKGTTVTVSS

SEQ ID NO: 751 - protein, 138 aa, Homo sapiens
QVQLVQSGAEVKKPGASVKVSCKASGYTFTSYDINWVRQATGQGLEWMGWMNPNSGNTGYAQKFQGRVTMTRNTSISTAYMELSSLRSEDTAVYYCARATTDCSSTSCWSLDFWSGYYTGGREKIFDWGQGTLVTVSS

SEQ ID NO: 752 - protein, 118 aa, Homo sapiens
QVQLVQSGSELKKPGASVKVSCKASGYTFLRFAMNWLRQAPGQGLEWMGWIDTNTGTPTYAQGFTGRFVFSLDTSVSTAYLQISSLKAEDTAVYYCARSLRGANLVPWGQGTLVTVSS

SEQ ID NO: 753 - protein, 118 aa, Homo sapiens; identical to SEQ ID NO: 752

SEQ ID NO: 754 - protein, 127 aa, Homo sapiens
QVQLVESGGGLMQAGGSLRLSCAVSGRTFSTAAMGWFRQAPGKEREFVAAIRWSGGSAYYADSVKGRFTISRDKAKNTVYLQMNSLKYEDTAVYYCARTENVRSLLSDYATWPYDYWGQGTQVTVSS

SEQ ID NO: 755 - protein, 127 aa, Homo sapiens
QVQLVESGGGLMQAGGSLRLSCAVSGRTFSTAAMGWFRQAPGKEREFVAAIRWSGGSAYYADSVKGRFTISRDKAKNTVYLQMNSLKYEDTAVYYCAQTHYVSYLLSDYATWPYDYWGQGTQVTVSS

SEQ ID NO: 756 - protein, 126 aa, Homo sapiens
QVQLVQSGAEVKKPGASVKVSCKASGYTFTGYYMHWVRQAPGQGLEWMGRINPNSGGTNYAQKFQGRVTMTRDTSISTAYMELSRLRSDDTAVYYCARVPYCSSTSCHRDWYFDLWGRGTLVTVSS

SEQ ID NO: 757 - protein, 126 aa, Homo sapiens
QVQLVESGGGVVQPGRSLRLSCAASGFTFSSYGMHWVRQAPGKGLEWVAVIWYDGRNKYYVDSVKGRFTISRDNSKNTLYLQISSLRAEDTAVYYCARAARRPVVTDTMAYYMDVWGKGTTVTVSS

SEQ ID NO: 758 - protein, 123 aa, Homo sapiens
QMQLVQSGPEVKKPGTSVKVSCKASGFTFTSSAVQWVRQARGQRLEWIGWIVVGSGNTNYAQKFQERVTITRDMSTSTAYMELSSLRSEDTAVYYCAAPHCSSTICYDGFDIWGQGTMVTVSS

SEQ ID NO: 759 - protein, 120 aa, Homo sapiens
QVQLVESGGGVVQPGRSLRLSCAATGFTFRRYGMHWVRQAPGKGLEWVAGILFDGSNKYYVDSVKGRFTISRDSSRNTLYLQLNSLRREDTAVYYCAKGGDYEWELLESWGQGTLVTVSS

SEQ ID NO: 760 - protein, 117 aa, Homo sapiens
EVQLVESGGGLVQPGGSLRLSCAASGFTVSSNYMSWVRQAPGKGLEWVSVIYSGGSTFYADSVKGRFTISRDNSKNTLYLQMNSLRAEDTAVYYCARDFGDFFFDYWGQGTLVTVSS

SEQ ID NO: 761 - protein, 117 aa, Homo sapiens
EVQLVESGGGLVQPGGSLRLSCAASGFIVSSNYMSWVRQAPGKGLEWVSVIYSGGSTFYADSVKGRFTISRDNSKNTLYLQMNSLRAEDTAVYYCARDYGDYFFDYWGQGTLVTVSS

SEQ ID NO: 762 - protein, 123 aa, Homo sapiens
QMQLVQSGPEVKKPGTSVKVSCKASGFTFSSSAVQWVRQARGQRLEWIGWIVVGSGNTNYAQKFQGRVTITRDMSTRTAYMELSSLRSEDTAMYYCAAPYCSSTRCYDAFDIWGQGTMVTVSS

SEQ ID NO: 763 - protein, 125 aa, Homo sapiens
EVQLVESGGGLVQPGRSLRLSCAASGFTFDDYAMHWVRQAPGKGLEWVSGISWNSGSIGYADSVKGRFTISRDNAKNSLYLQMNSLRAEDTGLYYCAKDINYDSGGYHKNYFDYWGQGTLVTVSS

SEQ ID NO: 764 - protein, 125 aa, Lama pacos
QVQLVESGGGSVQAGGSLRLSCAASGSISSITYLGWFRQAPGKEREGVAALITDSGRTYYADSVKGRFTVSLDNAKNTVYLQMNSLKPEDTALYYCAAAEWGYEWPLYYASSWYWGQGTQVTVSS

SEQ ID NO: 765 - protein, 125 aa, Lama pacos; identical to SEQ ID NO: 764

SEQ ID NO: 766 - protein, 125 aa, Lama pacos; identical to SEQ ID NO: 764

SEQ ID NO: 767 - protein, 125 aa, Lama pacos; identical to SEQ ID NO: 764

SEQ ID NO: 768 - protein, 125 aa, Lama pacos; identical to SEQ ID NO: 764

SEQ ID NO: 769 - protein, 125 aa, Lama pacos; identical to SEQ ID NO: 764

SEQ ID NO: 770 - protein, 125 aa, Lama pacos; identical to SEQ ID NO: 764

SEQ ID NO: 771 - protein, 125 aa, Lama pacos; identical to SEQ ID NO: 764

SEQ ID NO: 772 - protein, 125 aa, Lama pacos; identical to SEQ ID NO: 764

SEQ ID NO: 773 - protein, 125 aa, Lama pacos; identical to SEQ ID NO: 764

SEQ ID NO: 774 - protein, 125 aa, Homo sapiens; identical to SEQ ID NO: 764

SEQ ID NO: 775 - protein, 125 aa, Homo sapiens; identical to SEQ ID NO: 764

SEQ ID NO: 776 - protein, 125 aa, Homo sapiens; identical to SEQ ID NO: 764

SEQ ID NO: 777 - protein, 125 aa, Homo sapiens; identical to SEQ ID NO: 764

SEQ ID NO: 778 - protein, 125 aa, Homo sapiens; identical to SEQ ID NO: 764

SEQ ID NO: 779 - protein, 125 aa, Homo sapiens; identical to SEQ ID NO: 764

SEQ ID NO: 780 - protein, 125 aa, Homo sapiens; identical to SEQ ID NO: 764

SEQ ID NO: 781 - protein, 125 aa, Homo sapiens; identical to SEQ ID NO: 764

SEQ ID NO: 782 - protein, 125 aa, Homo sapiens; identical to SEQ ID NO: 764

SEQ ID NO: 783 - protein, 125 aa, Homo sapiens; identical to SEQ ID NO: 764

SEQ ID NO: 784 - protein, 125 aa, Homo sapiens; identical to SEQ ID NO: 764

SEQ ID NO: 785 - protein, 125 aa, Homo sapiens; identical to SEQ ID NO: 764

SEQ ID NO: 786 - protein, 125 aa, Homo sapiens; identical to SEQ ID NO: 764

SEQ ID NO: 787 - protein, 116 aa, Homo sapiens
EVQLVESGGGVVQPGRSLRLSCAASGFTFSSYGMHWVRQAPGKGLEWVAVIWYDGSNKYYADSVKGRFTISRDNSKNTLYLQMNSLRAEDTAVYYCARVGSGRVYWGQGTLVTVSS

SEQ ID NO: 788 - protein, 130 aa, Homo sapiens
QVQLVESGPGLVRPSGTLSVTCAVSGDSISSDYWCTWVRQSPGKGLEWIGKISHSGSLNYNPSLKSRVTMSVDKSKNHFSLKLASVTAADTAVYYCARVRIGASHHNFWSGYYTDAFDIWGQGTTVTVSS

SEQ ID NO: 789 - protein, 128 aa, Homo sapiens
QVQLVQSGAEVKKPGESLKISCKASGYSFTNYWVGWVRQMPAKGLEWMGIIWPDDSDTRYRPSFQGQVTISVDKSISTAYLHWNSLKASDNGMYFCARAPLASCSGGRCPTYNRFDLWGQGTLVTVSS

SEQ ID NO: 790 - protein, 125 aa, Homo sapiens
QVQLVQSGAEVKKPGSSMKVSCKASGVNFRSYSFSWVRQAPGQGLEWMGGVIPYFPTANYADKFRDRVTITADESTGTVYLDMSSLRSEDTAVYFCASEYFDGRSYHSFCGLDVWGQGTTVTVSS

SEQ ID NO: 791 - protein, 123 aa, Homo sapiens
QVQLVESGGGLVQPGGSLRLSCAASGFTFSNYAMTWVRQAPGKGLKWVSGINPSGDATFYTDSVKGQFTISRDNSKNILYLQMNRLRADDTAIYYCAKGLSFYGSGSDAFDVWGQGTTVTVSS

SEQ ID NO: 792 - protein, 124 aa, Homo sapiens
QVQLVQSGAEVKKPGASVKVSCKASGYTFTDYYVHWVRQVPGQGLEWMGWISPDSGDTIRAQNFQGRVTMTRDTSMNTAYMEVNRLRTDDTAIYYCARDLISVIRGLGGGMDVWGQGTTVTVSS

SEQ ID NO: 793 - protein, 126 aa, Homo sapiens
QVQLVQSGAEVKKPGASVKVSCKTSGYTFTGHYIHWVRQAPGQGLEWMGWINPASGDTNYAQKFQGRVTKTRDTSITTAYMELNRLRSDDTAVYYCARGGPLPWSDLDIVGTFDYWGQGTLVTVSS

SEQ ID NO: 794 - protein, 125 aa, Homo sapiens
EVQLVESGGGVVQPGKSLRLSCVPSGFSFGTYGMHWVRQAPGKGPEWLAVMWYDGITQYYADSVKGRFTISRDNSKETLYLQMNSLTADDTGIYYCVKDQSSGDRLLYLGYFDLWGPGALVTVSS

SEQ ID NO: 795 - protein, 125 aa, Homo sapiens
QVQLVQSGGGVVQPGKSLRLSCVASGFSFGTYGMHWVRQAPGKGPEWLAVMWYDGITQYYADSVKGRFTISRDNSKETLYLQMNSLTADDTGVYYCVKDQSSGDRLLYLGYFDLWGPGTLVTVSS

SEQ ID NO: 796 - protein, 127 aa, Homo sapiens
QVQLQESGPGLVKPSGTLSLTCAVSGASVSSDHWWSWVRQSPGKGLEWIGEVYHSGSTNYNPSLKSRVTISLDQSNNQFSLKLTSVTAADTAIYYCATMWGGLCTASNCYGNPMDVWGQGTTVTVSS

SEQ ID NO: 797 - protein, 129 aa, Homo sapiens
QVQLVQSGAEVRKPGSSVKLSCKASGGTFSTHAISWVRQAPGQRPEWMGGIMPIFGESKDTQKFQGRVTFTADESTTTAYMELRSLRSDDTAIYYCVRDSDPYTATVTSNHYWYAMDVWGQGTTVTVSS

SEQ ID NO: 798 - protein, 128 aa, Homo sapiens
QVQLQQWGAGVLKPSETLSLTCAVYGGSFRGFFWSWIRQPPGKGLEWIGQITHSGSTNYNSSLKSRLTISVDTSKNQFSLNLSSVTAADTAIYYCARGQGGYDLRRVGYGLTSWFDPWGQGILVTVSS

SEQ ID NO: 799 - protein, 127 aa, Homo sapiens
QVQLVQSGAEVKKPGASVKVSCKASGYTFTSYYIHWVRQAPGQGLEWLGVIHPSGGSTTFAQKFQGRVTMTRDTSTSTVYMELGSLRSDDTAVYYCARVLAGSSHEWQLTHDAFDIWGQGTTVTVSS

SEQ ID NO: 800 - protein, 124 aa, Homo sapiens
EVQLVESGAEVKKPGASVILSCKASGYTVTNYYIHWVRQAPGQGLEWMGWIDPDSGVTNFAEKFQGRVTMTRDTSISTAYMELRWLESDDTAVYYCAKDLITVIRGLGGGMDVWGQGTTVTVSS

SEQ ID NO: 801 - protein, 122 aa, Homo sapiens
EVQLLESGAEVKKPGSSVKVSCKASGGTFSSDAISWVRQAPGQGLEWMGGIIPIFGTTNYAQKFQGRVTITADESTNTAYMELSSLRSEDTAVYYCARDGPYDSGGYHLNHWGQGTLVTVSS

SEQ ID NO: 802 - protein, 120 aa, Homo sapiens
EVQLLESGGGVVNPGGSMRLSCAGSGFTFSDHYMGWIRQAPGKGLEVISYISSSGSFIRDADSVKGRFTISRDNAKNSVYLQMNSLRAEDTAVYYCARMGPYGSGTFDYWGQGTLVTVSS

SEQ ID NO: 803 - protein, 124 aa, Homo sapiens
EVQLVESGAEVRKPGSSVKVSCKATGGTFSSYGITWVRQAPGQGLEWMGRIIPTLGRTNYAQKFQGRVTITADKSTSTAHMELSSLRSEDTAVYYCARDLSTLQPDAIVNFDYWGQGTLVTVSS

SEQ ID NO: 804 - protein, 123 aa, Homo sapiens
QVQLVQSGAEVKKPGSSVKVSCKTSGGSFTSYVLSWVRQAPGQGLEWMGRIVPNLGVANYAQKFQDRVTITADKSTTTAYLELRSLRSEDTAVYYCARDLYYDNGGYNYLDYWGPGTLVTVSS

SEQ ID NO: 805 - protein, 127 aa, Homo sapiens
QVQLVESGGGLVQPGGSLRLSCAASGFTFSNYNMVWVRQAPGKGLEWISYISSSSSTIYYADSVKGRFIISRDNAKNSLHLQMNSLRDEDTAVYYCVRDYCNSVSCYTYYYIGMDVWGQGTTVTVSS

SEQ ID NO: 806 - protein, 123 aa, Homo sapiens
EVQLVQSGAEVKKPGASVKVSCKASGYSSTNYGFSWVRQAPGQGLEWMGWISVHSGNANFAQKFQGRITMTTDTSTTTAYMELRNLRSDDTATYYCATSASSYSRYYFGLDVWGQGTTVTVSS

SEQ ID NO: 807 - protein, 126 aa, Homo sapiens
EVQLLESGPGLVKPSQTLSLTCTVSNGFISSGEYYWSWIRQSPGKGLEWIGYISHSGSTYYNRSLKSRVTISLDTSRNQFSLNLSSVTAADTAVYYCARDLAKWSYGYYYSGMDVWGQGTTVTVSS

SEQ ID NO: 808 - protein, 124 aa, Homo sapiens
QVQLVQSGAEVKKPGSSVKVSCKISGGTFKNSAFSWARQVPGQGFQWMGGIIPMFGVPHSVQMFQGRVTLTADESTSAVYMELSGLTSDDTAVYYCAREEYSGTVHNFFGMDVWGQGTTVTVSS

SEQ ID NO: 809 - protein, 125 aa, Homo sapiens
EVQLVESGGGLVQPGRSLRLSCAASGFTFDDYAMHWVRQVPGRGLEWVSGISWNSGTINYADSVMGRFTISRDNAKNSLYLQMNSLRAEDTALYYCAKDGRYCSGISCRTGMDVWGQGTTVTVSS

SEQ ID NO: 810 - protein, 121 aa, Homo sapiens
EVQLVESGGGLVQPGESLRLSCAASGFNFSPYGMNWVRQAPGKGLEWIAYIISGSGTIYYADSVKGRFTISRDNAQSSLYLQMNSLRAEDTAVYYCARGLLDYLHDAFDIWGQGTMVTVSS

SEQ ID NO: 811 - protein, 123 aa, Homo sapiens
EVQLQESGPGLVKPSETLSLTCAVSGGSVSSDTDYWGWIRQPPGKGLEWIGSIHDSERTYYDPSLKSRVTISVDTSKNQFSLRLSSVTAADTALYFCASRHLDLLPIGSFDVWGRGTMVTVSS

SEQ ID NO: 812 - protein, 125 aa, Homo sapiens
QVQLLESGGGLVQPGRSLRLSCTASGFRFGDYTMTWFRQAPGKGLEWVGFIRSIAYGGTTEHAASVEGRFIISRDDSKSIAYLQMNSLKAEDTGVYFCTRGSGMFYGSSSGMDVWGQGTTVTVSS

SEQ ID NO: 813 - protein, 121 aa, Homo sapiens
EVQLLESGAEVKKPGSSVKVSCKTSGGTFNSYTISWVRQAPGQGLEWMGGIIPILDTPHYAQKFRGRVTITADKSTSTAFMDLSSLTSEDTAVYYCAIRRDYSDYRDFDYWGQGTLVTVSS

SEQ ID NO: 814 - protein, 121 aa, Homo sapiens
EVQLVESGPGLVKPSETLSLACTVSGGSISNYYWNWVRQPPGKGLEWIGNIYYSGSTTFNPSLKSRVTISVDTSRNQFSLKLSSVTAADTAVYYCARQSSSWYNPYYFDQWGQGTLVTVSS

SEQ ID NO: 815 - protein, 121 aa, Homo sapiens
QVQLVQSGGGLVQPGESLRLSCAASGFNFSPYGMNWVRQAPGKGLEWIAYIISGSGTIYYADSVKGRFTISRDNAQSSLYLQMNSLRAEDTAVYYCARGLLDYLHDAFDIWGQGTMVTVSS

SEQ ID NO: 816 - protein, 126 aa, Homo sapiens
EVQLVESGAEVKNPGSSVKISCKSSGGTLGDYAISWVRQAPGLGLEWLGGIMPLHGTTGYSQRFRPRLTITADESARTAYMELTALSSEDSAIYYCARDPSILNTGNHHWYDLDLWGQGTEVTVSS

SEQ ID NO: 817 - protein, 121 aa, Homo sapiens
EVQLLESGGGVVQPGRSLRLSCAASGFTFNSYALFWVRQAPGKGLEWVAVVSYDGNNKYYADSVKGRFTISRDNSKNTLYLQMNSLKTEDTSVYYCARPRSGSYRQAIDYWGLGTLVTVSS

SEQ ID NO: 818 - protein, 123 aa, Homo sapiens
QVQLVQSGGGLVQPGGSLRLSCAASGFIFSGHWMSWVRQAPGKGLEWVANIKQDGREKHYVDSVKGRFTISRDNAKNSVSLQMNSLRAEDTAVYYCVRQNVAIQYYYYAMDVWGQGTTVTVSS

SEQ ID NO: 819 - protein, 121 aa, Homo sapiens
EVQLVESGGGVVQPGRSLRLSCAASGFTFSGYPMHWVRQAPGKGLEWVALISFDGDSKYYTDSVKARFAISRDNSKNTLFLQMNSLRVADTALYYCARAKGGSYSNAFDYWGQGTLVTVSS

SEQ ID NO: 820 - protein, 126 aa, Homo sapiens
QVQLVESGAEVKKPGSSVKVSCKASGGTLSDYAISWVRQAPGQGLEWMGGIMPIFGSPGYAEIFQGRVTITADESKSTVYMELTSLRSEDTAVYYCARDPSILDTGNHHWYDLDIWGQGTMVTVSS

SEQ ID NO: 821 - protein, 124 aa, Homo sapiens
QVQLVQSGAEVKKPGSSVKVSCKTSGATYKNSAFSWARQAPGQGFQWMGGIIPLFGVPHYVQMFQGRVTITADESTSAVYMELSGLTSDDTAVYYCAREEYSGTVHNFFGMDVWGQGTTVTVSS

SEQ ID NO: 822 - protein, 122 aa, Homo sapiens
EVQLVESGGGLVQPGGSLRLSCSASEFTLRSHAMHWVRQAPGKGLEYVSGISTDGSGRFYADSVKGRFTISRDNSKNKLFLQMSSLRPEDTAVYYCVRDWGSSTHYDVFDLWGQGTMVTVSS

SEQ ID NO: 823 - protein, 126 aa, Homo sapiens
QVQLVQSGAEVKKPGSSVKVSCKASGGTLADYAISWVRQAPGQGLEWMGGIKPLHGAAGYSQHFRGRLSITADESASTAYMELTGLRSEDTAMYYCARDPSILNTGNHHWYDLDLWGQGTMVTVSS

SEQ ID NO: 824 - protein, 126 aa, Homo sapiens
QVQLVQSGAELKKPGSSVKVSCKASGGTFYNSAFSWLRHAPGQGPEWMGGITPSLGRVGYSERFLARLTITADESTSTVYMELTSLASEDTAVYYCARDASIVGTGNHLWYGLDFWGHGTTVTVSS

SEQ ID NO: 825 - protein, 123 aa, Homo sapiens
EVQLVESGGHVVLPGKSLRLSCAGSGFGFPLYAMQWVRRAPGKGLEWVALVSYDSSNIRYADSVKGRFTISRDNSQNTLYLQMDSLRPEDTAMYYCARDNALQDGRPGYFDSWGQGTLVTVSS

SEQ ID NO: 826 - protein, 123 aa, Homo sapiens
EVQLVESGGGLVKPGGSLRLSCAASGFIFSDYYMSWIRQAPGKGLEWVSYITGSGRTIHYADSVKGRFTISRDNAKNSVYLQMNSLRAEDTAVYYCARGHRFLEFPLNYFDPWGQGTLVTVSS

SEQ ID NO: 827 - protein, 123 aa, Homo sapiens
EVQLLESGGHVVLPGKSLRLSCAGSGFGFPLYAMQWVRRAPGKGLEWVALVSYDSSNIRYADSVKGRFTISRDNSQNTLYLQMDSLRPEDTAMYYCARDNALQDGRPGYFDSWGQGTLVTVSS

SEQ ID NO: 828 - protein, 130 aa, Homo sapiens
EVQLVESGGGVVQPGRSLRLSCAASGFTFSKFAMHWVRQAPGKGLEWVAIISYDGSHKNYADSVKGRFTISRDNSKNTVYLQVDSLRAEDTAVYYCALLYGSGSYYNFVFFGWKDGSDAWGPGTTVTVSS

SEQ ID NO: 829 - protein, 129 aa, Homo sapiens
QVQLVQSGAEVKKPGSSVKVSCKASGGMFTDYAISWVRQAPGQRLEWMGGILPAFAASGSPGYAPIFRGRATFSADVSTSTAYLELTNLKPEDTAVYYCARDPSILNTGNHHWYDLDLWGQGTEVTVSS

SEQ ID NO: 830 - protein, 126 aa, Homo sapiens
QVQLVQSGAELKKPGSSVRVSCKAAGGTLTNYAISWVRQAPGQGFEWMGGIMPVSHTAGYAQKFQGRVTFTADESATTAYMDLTSLRPEDTAIYYCARDPSIHYTGNHHWYDLDIWGQGTMVTVSS

SEQ ID NO: 831 - protein, 126 aa, Homo sapiens; identical to SEQ ID NO: 830

SEQ ID NO: 832 - protein, 129 aa, Homo sapiens
QVQLVQSGAEVKKPGSSMRVSCRVSGGTFITHAMSWVRQAPGQGPEWMGGIVPLFGRASYAQPSQTRVQITADESTSTVYLEVPSLTSEDTAVYYCVRDSEPYTATRSQNHYWYDMDVWGQGTTVTVSS

SEQ ID NO: 833 - protein, 126 aa, Homo sapiens
QVQLVQSGAELKKPGSSVRVSCKAAGGTLTNYAISWVRQAPGQGFEWMGGIMPVSHTAGYAQKFQGRVTFTADESATTAYMDLTSLRPEDTAIYYCARDPSIHYTGNHHWYDLDIWGQGTTVTVSS

SEQ ID NO: 834 - protein, 126 aa, Homo sapiens
QVQLVQSGAEVKKPGSSVKVSCKASGGTLSHYAISWVRQAPGQGLEWMGGIMPVSGTVGYAQKFQGRVKFTADEYASTAYMELTNLRSEDSAVYFCARDPSIVDSGPHHWYDLDIWGQGTMVTVSS

SEQ ID NO: 835 - protein, 116 aa, Homo sapiens
QVQLVESGAEVKRPGASVKVSCKASGYAFSDYYMHWVRQAPGQGPEWMGWINPNSGDTGYPQKFRGWVTMTRDTSVSTAYMELKRLKSDDTAVYYCASGPNYFDYWGQGTLVTVSS

SEQ ID NO: 836 - protein, 125 aa, Homo sapiens
EVQLLESGGGLVKPGGSLRLSCEASGFTFSNYNMNWVRQAPGKGLEWVSSISGSSSYISYADSVKGRFTISRDNAKNSLYLQMNSLRVEDTAVYYCARADRDYDFWSDPPLIDHWGQGTLVTVSS

SEQ ID NO: 837 - protein, 120 aa, Homo sapiens
EVQLVESGGGLIQPGGSLRLSCAASGFTVTDNYMSWVRQAPGKGLEWVSVLYSGGSTYYADAVQGRFSISRDNSKNALYLQMNSLRAEDTAVYYCARGFGNGWSYYFDYWGQGTLVTVSS

SEQ ID NO: 838 - protein, 129 aa, Homo sapiens
EVQLVQSGGGLVQPGGSLRLSCAASGFTFSSYSMSWVRQAPGKGLEWVSYITRSSDNIYYAESVKGRFTISRDSAKNSLYLHMNSLRDEDTAVYYCARDPGLEYSGNYFSYYYYAMDVWGQGTTVTVSS

SEQ ID NO: 839 - protein, 129 aa, Homo sapiens
QVQLVQSGAEVKKPGSSVKVSCKASGGTFSTHAISWVRQAPGHGPEWMGGIIPLFGTSESAQRFQARVRFTADESTSTAYMELSSLTSEDTAVYYCVRDSDPYTATSRNNHYWYDMDVWGQGTTVTVSS

SEQ ID NO: 840 - protein, 126 aa, Homo sapiens
QVQLVQSGAEVKKPGSSVKVSCKVSGGRFSDYAISWLRQAPVKGLEWMGGIIPRLNRKGYSQDFQGRLTFTADESTSTAYMELSGLTSEDTAVYYCARDPTFLNSGNHFWYAVDIWGQGTTVTVSS

SEQ ID NO: 841 - protein, 129 aa, Homo sapiens
EVQLVESGAEVRTPGSSVKLSCKASGGTFSTHAFSWVRQAPGQRPEWMGGIIPIFGESKDTQKFQGRVTFTADESTTTVYMELRSLKSDDTAIYYCVRDSDPYTATYRNNHYWYAMDVWGQGTTVTVSS

SEQ ID NO: 842 - protein, 120 aa, Homo sapiens
EVQLVESGGGVVKPGGSLRVSCVGSGFTFSDHYMSWIRQAPGKGLEIISYISTDGSYINDADSVKGRFINSRDNAKNSVYLQLNSLRAEDTAVYYCARMGPSGSGSLDYWGQGSLVTVSS

SEQ ID NO: 843 - protein, 125 aa, Homo sapiens
EVQLVESGPTLVKPTQTLTLTCTFSGFSLNTRELGVGWIRQPPGKALEWLALIYWDDDKRYSPSLKSRLSITKDTSKNQVVLTLTNMDPGDTATYYCAHTSELPPRRPYAAFDFWGQGTLVTVSS

SEQ ID NO: 844 - protein, 116 aa, Homo sapiens
EVQLVESGGGVVQPGGSLRLSCVASGFPFGRYAMHWVRQAPGQGLEWLTLISFDSSNIEYSDSVQGRFTISRDNSRNTLFLQMTSLRPEDTAVYFCARDLPPLDYWGQGTLVTVSS

SEQ ID NO: 845 - protein, 126 aa, Homo sapiens
QVQLQQWGAGLLKPSETLSLTCAVNGGSFNNYYWSWIRQPPGKGPEWIGEVVHSGSTTYNPSLKSRVTISIDMSKNQFALKLNSVTAADTAVYYCARGFTFTYSDFLTGQRTFEYWGQGTLVTVSS

SEQ ID NO: 846 - protein, 120 aa, Homo sapiens
EVQLVESGGGVVQPGRSLRLSCAASGFTFSSYAMHWVRQAPGKGLEWVALISYDGDKKYYPDSVRGRFTISRDNSKNTLHLQMNSLRLEDTAVYYCARSYGGSYSTVGYWGQGALVTVSS

SEQ ID NO: 847 - protein, 120 aa, Homo sapiens
QVQLVQSGGDSVNPGGSLRLSCAGSGFSVRDVWMSWVRQAPGKGLEWIGRIKSEADGGSSDYRASLKDRFSIWRDASKNTLYLQVNGLQTEDTAIYFCSWNDVGWAFTFWGQGTLVTVSS

SEQ ID NO: 848 - protein, 124 aa, Homo sapiens
QVQLVQSGAEVKKAGSSVKVSCKASGGPFSSFAISWVRQAPGQGLEWLGGIMTVFGPAHYAQKSRDRISITADESTSTSYLELSSLTSDDTAVYYCAAEERSGTNHNYYGLDVWGQGTTVTVSS

SEQ ID NO: 849 - protein, 124 aa, Homo sapiens
EVQLVESGGGLIQPGGSLRLSCAASGFPFSGTYMTWVRQAPGKGLEWVSIIYSGGDTYYADSVKGRFTISRDNSKNTLFLQMNSLRVEDTAMYYCARDREMAIITERSYGLDVWGQGTMVTVSS

SEQ ID NO: 850 - protein, 125 aa, Homo sapiens
EVQLVESGGGLVQPGGSLRLSCGASGFTFSDYAMSWVRQAPGKGLEWVSTISGSGDKTYYADSLKGRFTNSRDNSKSTLYLQMTSLRAEDTAVYFCAKDRYCSGGSCFYDAFDIWGQGTTVTVSS

SEQ ID NO: 851 - protein, 122 aa, Homo sapiens
EVQLVESGGGVVQPGRSLRLSCEASGFTFADYPMHWVRQAPGKGLEWVAVISSHGRSQGYAASVKGRFTFSRDNSQSSLFLQLNSLRVEDTAVYFCAREAQSSGRAGCLDAWGQGTLVTVSS

SEQ ID NO: 852 - protein, 126 aa, Homo sapiens; identical to SEQ ID NO: 830

SEQ ID NO: 853 - protein, 129 aa, Homo sapiens
QVQLVQSGAEVREPGSSVKLSCKTSGGTFSTHAISWVRQAPGQRPEWMGGIMPIFGESKDTQKFQGRVTFTADESTTTAYMELRSLKSDDTAIYYCVRDSDPYTATVRSNHYWYAMDVWGQGTTVTVSS

SEQ ID NO: 854 - protein, 126 aa, Homo sapiens
EVQLVQSGAEVKKPGSSVKVSCKVSGGRFSDYAISWLRQAPVKGLEWMGGIIPRLNRKGYSQDFQGRLTFTADESTSTAYMELSGLTSEDTAVYYCARDPTFLNSGNHFWYAVDIWGQGTTVTVSS

SEQ ID NO: 855 - protein, 127 aa, Homo sapiens
QVQLQESGRGLVKPSETLSLTCTVSGGSITSSRYYWGWIRQPPGRNLEWIGSIHYSGTTSYNPSLWSRVAISVDTAQNQFSLRLNSVTAADTAVYYCAAPAPSNHESWSGTDWFDPWGQGILVTVSS

SEQ ID NO: 856 - protein, 123 aa, Homo sapiens
QVQLVQSGAEVKGPGASVKVSCKVSGYSFITYDITWVRQAPGQGLEWMGWISTKSGDTRYAQNVQGRVTMTTDTSTNTAYMELRNLKSDDTALYYCARTTPRGWEQWPVLEYWGQGTLVTVSS

SEQ ID NO: 857 - protein, 124 aa, Homo sapiens
EVQLVESGGGLVQPGGSLRLSCEASGFNFNSYSMSWVRQAPGKGLEWLSYISSRSSTIKYASSVQGRFTVSRDNAKKSVYLQMNSLRDEDTAVYFCARELDSETYYNYNSLDVWGQGTTVTVSS

SEQ ID NO: 858 - protein, 128 aa, Homo sapiens
QVQLVESGGEVKKPGASVKVSCKASGYTLSSYPISWVRQAPGHGLEWMGWINTYNGRTNYEQMLQGRVTMTTDTSTSTAYMELRSLRSDDTAVYYCARVVFRHGQYDDSSGRLAFDIWGQGTMVTVSS

SEQ ID NO: 859 - protein, 126 aa, Homo sapiens; identical to SEQ ID NO: 830

SEQ ID NO: 860 - protein, 129 aa, Homo sapiens
EVQLLESGAEVKKPGSSVKVSCKTSGGTFSTHAISWVRQAPGQGPEWMGGIIPLFGTSEHAQRFQARVKFTADESTSTAYMELSSLTPEDTAVYYCVRDSDPYTATSRNNHYWYGMDVWGQGTTVTVSS

SEQ ID NO: 861 - protein, 122 aa, Homo sapiens
EVQLLESGGGVVQPGTSLRLSCAVSGFMFKNYAIHWVRQAPGKGLEWVAVISFDGSDISYTESVQGRFTISRDNSENMLYLQMNSLRAEDTAMYYCAREPDGIGAAGISGYWGQGTLVTVSS

SEQ ID NO: 862 - protein, 123 aa, Homo sapiens
EVQLVESGGGLVKPGGSLRLSCVASGFTFSDFYMSWIRQAPGKGLEWVSYISGSGDTIYYADSVKGRFTVSRDNAKNSLFLQMSSLGAEDTAMYYCAREMATSFGYYFVLDVWGQGTTVTVSS

SEQ ID NO: 863 - protein, 124 aa, Homo sapiens
QVQLQQWGAGLLKPSETLSLSCAVYGGSFSGFYWSWIRQPPGKGLEWIGEINHSGSANYNPSLMSRVTISMDTSKKQFSLQLRSVTAADTAVYYCARGQESPIVGVTGRWFDPWGQGTLVTVSS

SEQ ID NO: 864 - protein, 121 aa, Homo sapiens
EVQLVESGGGVVQPGRSLRLSCAASEFTFSTYAMHWVRQAPGKGLEWVALISYDGINKYYADSVKGRFAISRDNSKNTLYLQVNSLRADDTAVYYCVRPYSGSYTNWFDLWGQGTLVTVSS

SEQ ID NO: 865 - protein, 126 aa, Homo sapiens
QVQLVQSGAEVKKPGSSVKVSCKASGGMLSDYAISWVRQAPGQRLEWMGGIMPAFGSPGYAQIFRGRATISADVSTSTAYLELTSLKPEDTAVYYCARDPSILNTGNHHWYDLDIWGQGTMVTVSS

SEQ ID NO: 866 - protein, 126 aa, Homo sapiens
QVQLVQSGAEVKMPGSSVKVSCKVSGGRFSDYAISWLRQAPLEGLEWMGGIVPHLNRKGYSQKFQDRLTFTADDSTSTAYMELSGLTSEDTAVYYCARDPTFLNTGNHFWYAVDIWGQGTTVTVSS

SEQ ID NO: 867 - protein, 129 aa, Homo sapiens
QVQLVQSGAEVKKPGSSVKVSCKASGGTFSTHAISWVRQAPGHGPEWLGGILPLFGTSESAQRFQARVKITADESTSTAYMELSSLTSEDTAVYYCVRDSDPYTATSRNNHYWYAMDVWGQGTTVTVSS

SEQ ID NO: 868 - protein, 126 aa, Homo sapiens
QVQLVQSGAEVKKPGSSVKVSCKVSGGTFSNYAISWLRQAPGQGPEWMGGIIPALSRVGYVRKFQARLTISADELTTTAYMDLSSLTSEDTAVYYCARDPSFLNTGNHFWYDFDLWGQGTTVTVSS

SEQ ID NO: 869 - protein, 126 aa, Homo sapiens
QVQLQQWGAGLLKPSETLSLTCAVYGGSFSGFYWTWIRQPPGKGLEWIGEINHSGSSNYDLSLKSRVTMSVDTSKNQFSLKLSSVTAADTAVYYCARGMISPRIPRTTRQRWFDTWGQGTLVTVSS

SEQ ID NO: 870 - protein, 127 aa, Homo sapiens
QVQLQQWGAGLLKPSETLSLTCGVYGGSFSGYFWSWIRQSPGKGLEWIGEINHSRSMSYNPSLKSRITMSVDTSKNQFSLNLNSVTAADTAVYFCARGKAHRNDFWSGYYPHWFDPWGQGILVTVSS

SEQ ID NO: 871 - protein, 129 aa, Homo sapiens
QVQLVQSGAEVKKPGSSVKISCKISGDTFSTNAISWLRQAPGREPEWMGGIVPLVGPASYAQRPQGRLTITADEFTNTAYLELNSLRSEDTATYYCARDSDPYTATRRHNHYWYAMDVWGQGTTVTVSS

SEQ ID NO: 872 - protein, 129 aa, Homo sapiens
EVQLLESGPGLVKPSETLSLTCTVSGGSINSQYWNWIRQSPGKGLEWIGYVYYSGSTNYNPSLKSRVTMSVDTSKNHFSLNLRSVTAADTAVYYCARGLVVRYFDGFPSGPIIGAFDIWNQGTTVTVSS

SEQ ID NO: 873 - protein, 129 aa, Homo sapiens
QVQLVQSGAEVKKPGSSVKVSCKVSGGTFSSHAISWVRQAPGQRPEWMGGIMPIFGESKDTQKFQGRVTFTVDESTNTAYMELTSLKSEDTAIYYCVRDPDPYTATVRHNHYWHGMDVWGQGTTVTVSS

SEQ ID NO: 874 - protein, 129 aa, Homo sapiens
QVQLQQWGAGLLKPSETLSLTCAVYGGSFSGFHWSWIRQPPGKGLEWIGEVNHSGSTKYNPSLKSRVTVSVDTSKNQFSLRLSSVTAADTAIYYCARGSLSREYDFLTAPQNGPWFDSWGQGALVTVSS

SEQ ID NO: 875 - protein, 129 aa, Homo sapiens
EVQLLESGPGLVKPSETLSLTCTVSGGSISSNNLYWGWIRQPPGKGLEWIGSIYYSGSTYYNPSLKSRVIIPVDTSKDQFSLRLSSVTAADTAVYYCARHSQKDIVLIPAAQSPIFDYWGQGTLVTVSS

SEQ ID NO: 876 - protein, 121 aa, Homo sapiens
EVQLVESGGGLVQPGGSLRLSCSASGFTFSRYAMHWVRQAPGKGLEYVSAINLNGDSTYYTDSVRGRFTISRDNSKNTLFLQMSNVRPEDTAFYYCVKDGGYYDSSGPGHWGQGTLVTVSS

SEQ ID NO: 877 - protein, 122 aa, Homo sapiens
QVQLVQSGGGVVQPGGSLRLSCADSGNAFIANPMHWVRQAPGKGLEWLALISTDGNNRHYADSVKGRFTFSRDNSKNSLYLQMDSLRPEDTGVYYCARESRSSGRAGCFDSWGQGTLVTVSS

SEQ ID NO: 878 - protein, 121 aa, Homo sapiens
QVQLVESGGGVVQPGTSLRLSCAATGFTFTTYPMHWVRQAPGKGLEWVAVISYDGMNQYYADFLKGRFTISRDNSKNTLYLQMNSLRADDTAVYYCARAYGGNYQNHFDHWGQGTLVTVSS

SEQ ID NO: 879 - protein, 132 aa, Homo sapiens
EVQLVQWGAGLLKPSETLSLRCAVYGGSFNGFYWTWIRQAPGQGLEWIAEINHSGTTNYNPSLKSRVTISIDTSKKQFSLSLKSVTAADTAMYFCARGTISPIVGVPTPVVPRRGRSWFDPWGQGTLVTVSS

SEQ ID NO: 880 - protein, 129 aa, Homo sapiens
QVQLVQSGAEVKKPGSSVKVSCKASGGTFSTHAISWVRQAPGHGPEWLGGIIPLFGTSESAQRFQARVKITADESTSTAYMELSSLTSEDTAVYYCVRDSDPYTATSRNNHYWYAMDVWGQGTTVTVSS

SEQ ID NO: 881 - protein, 129 aa, Homo sapiens
QVQLVQSGAEVREPGSSVKLSCKTSGGPFSTHAFSWVRQAPGQRPEWMGGIMPVFGESKDTQKFKGRVTFTADASTTTTYMELRSLKSDDTAIYYCVRDSDPYTATSSHNHYWYAMDVWGQGTTVTVSS

SEQ ID NO: 882 - protein, 118 aa, Homo sapiens
QVQLVESGGGLVKPGGSLRLSCAASGFTFSDYYMIWIRQAPGKGLEWLSYISHTASTIYYADSVKGRFTISRDNAKNSLFLQMNSLTAEDTAVYYCARDRGSGVIDPWGQGTLVTVSS

SEQ ID NO: 883 - protein, 121 aa, Homo sapiens
QVQLVESGGGLVQPGGSLRLSCSASGFTFSRFAMHWVRQAPGKGLEYVSAINLNGDSTYYTDSVRGRFTISRDNSKNTLYLQMSSVRPDDTAFYYCVKDGGYYDSSGPGHWGQGTLVTVSS

SEQ ID NO: 884 - protein, 128 aa, Homo sapiens
EVQLVESGPGLVKPSETLSLTCTVSGASVTAGSSYWGWIRQPPGKGLEWIGYMFSSGNTKYNPSLKSRVTISADTSKNQFSLRLSSVTAADTAVYFCARVGWVRYFDWSKPYYYFDLWGRGTLVTVSS

SEQ ID NO: 885 - protein, 128 aa, Homo sapiens
EVQLVESGGGLVQPGGSLRLSCAASGFTFSTSAMSWVRQAPGKGLEWVSRIGGGGGRTKYADSVKGRFTISRDNSKNTLYLQMNSLRADDTAVYYCAKCDLVRYFDWLGEENNWFDPWGQGTLVTVSS

SEQ ID NO: 886 - protein, 129 aa, Homo sapiens
QVQLVQSGAEVRKPGSSVKLSCKASGGTFSTHAISWVRQAPGQRPEWMGGIMPIFGESKDTQKFQGRVTFTADESTTTAYMELRSLKSDDTAIYYCVRDSDPYTATVRNNHYWYALDVWGPGTMVTVSS

SEQ ID NO: 887 - protein, 123 aa, Homo sapiens
EVQLVESGGGLSQPGGSLRLSCAASGFTVRTYCMNWVRQAPGKGLEWVSLVCGDNIDYYPDSVKGRFSISRDDSKNTLLLHMDSLRVEDTAVYYCARATPPGGGTGWPYFDFWGQGTLVTVSS

SEQ ID NO: 888 - protein, 123 aa, Homo sapiens
QVQLVQSGAEMRKPGSSVKVSCKASGGTFSRYCFSWVRQAPGQRLEWMGGIMSILGAHYAQKFQGRVTFTADESTNTAYMELISLTSEDTAVYYCAREEPSGTYHNYYGLDVWGQGTTVTVSS

SEQ ID NO: 889 - protein, 130 aa, Homo sapiens
QVQLQESGPGLVKPSGTLSLTCAVSGGSISSSDWCSWVRQPPGKGPEWIAEISHSGSTNYNPSLKSRVTMSVDRSKNQFSLNLNSVTAADTAVYYCAARIRGATHYDFWSGFWAGPFDIWGQGTTVTVSS

SEQ ID NO: 890 - protein, 126 aa, Homo sapiens
EVQLQESGPGLVKPSGTLSLTCGVSGVSISSSSWWSWVRQPPGRGLEWIGEISPSGSTSYNPSFRSRLTMSVDKSRNQLSLKLSSVTAADTAVYYCARTQSNDFWSGYYTAAFDLWGQGTMVTVSS

SEQ ID NO: 891 - protein, 129 aa, Homo sapiens
QVQLVQWGAGLLKPSETLSLTCAVYGGSFSGFHWSWIRQPPGKGLEWIGEINHSGSTKYNPSLKSRVTISVDTSKNQFSLRLRSVTAADTAIYYCARGSLSREYDFLTAPQNGPWFDSWGQGALVTVSS

SEQ ID NO: 892 - protein, 124 aa, Homo sapiens
EVQLVESGPELKKPGSSVRVSCKASGGSFSNFAVSWVRQAPGQRLEWMGGVIPRFGRSEYVQKFQGRVTITVDEAASTAYMELSSLRSEDTAIYYCVLDTTSANPHNWYGMDVWGQGTTVTVSS

SEQ ID NO: 893 - protein, 120 aa, Homo sapiens
QVQLVQSGGGVVNPGGSLRLSCVGSGFTFSDYYMGWIRQAPGKGLEVISYISSTGSYIRDADSVKGRFTISRDNAENSVYLQMNSLRGEDTAVYYCARMGPYGSGSFDYWGLGTLVTVSS

SEQ ID NO: 894 - protein, 123 aa, Homo sapiens
QVQLQESGPGLVRPSETLSLTCTVSGDSVSSSDYHWGWIRQPPGKGLEWIGSIYYGGRSHFNPSLKSRVAIFVDTSNNQFSLRLNSVTASDTAVYFCAGRHQELLPMGSFDMWAQGTTVTVSS

SEQ ID NO: 895 - protein, 126 aa, Homo sapiens
PGPACTVWAEVKKPGSSVKVSCKASGGMFSDYAISWVRQAPGQRLEWMGGIMPGLGSPGYAQIFRGRATISADVSTSTAYLELTSLKPEDTAVYYCARDPSILNTGNHHWYDLDIWGQGTQVTVSS

SEQ ID NO: 896 - protein, 122 aa, Homo sapiens
QVQLVQSGAEVKKPGSSVKVSCKASGGTSSTHAISWVRQAPGQGLEWMGGIIPIFGTTNYAQKFQDRVTITADESTSTAYMELSSLRSEDTAVYFCVRDGAYDSSGYYSTQWGQGTLVTVSS

SEQ ID NO: 897 - protein, 126 aa, Homo sapiens; identical to SEQ ID NO: 854

SEQ ID NO: 898 - protein, 126 aa, Homo sapiens
QVQLVQSGAEVKKPGSSVTVSCKVSGGRFSDYAISWLRQAPVEGLEWMGGIIPHLNKKGYSQKFQDRITFTADESTSTAYMELSGLTSEDTAIYYCARDPTFLNTGNHFWYAVDIWGQGTTVTVSS

SEQ ID NO: 899 - protein, 127 aa, Homo sapiens
QVQLVQSGAEVKKPGASVKVSCKASGYTFSLFHVHWVRQAPGQGLEWMGWINPHNGDTTFAERFQGRVALTRDTSINTAYMELSRLTSDDTAVYFCARDFGVRYDDSRQLMKYCDSWGQGTLVTVSS

SEQ ID NO: 900 - protein, 126 aa, Homo sapiens
QVQLVQSGAEVKKPGSSVKVSCKASGGTLADYAISWVRQAPGQGLEWMGGIKPLHGAAGYSQLFRGRLSITADESASTAYMELTGLTSDDTAMYYCARDPSILNTGNHHWYDLDLWGQGTTVTVSS

SEQ ID NO: 901 - protein, 124 aa, Homo sapiens
QVQLVQSGPELKKPGSSVRVSCKASGGSISSYAISWVRQAPGQRLEWMGGVLPMMGRESPVQKFKDRVTIAADESTSTAYMELRSLSAEDTAVYYCVVDTTMADPHNWYGLDVWGQGTTVTVSS

SEQ ID NO: 902 - protein, 130 aa, Homo sapiens
QVQLVQSGPGLVRPSGTLSLTCAVSGDSISGDYWCTWVRQTPGKGLEWIGKISHSGSINYNPSLKSRITMSVDKSKNQFSLKLNSVTAADTAMYYCARVRVGASHHNFWSGYYTDAFDIWGQGTTVTVSS

SEQ ID NO: 903 - protein, 126 aa, Homo sapiens
QVQLVQSGAEVKKPGSSVKVSCKVSGGTFSNYAISWLRQAPGQGPEWMGGIIPALSRVGYARKFQARLTISADELTTTAYMDLSSLTSEDTAVYYCARDPSFLNTGNHFWYDFDMWGQGTTVTVSS

SEQ ID NO: 904 - protein, 122 aa, Homo sapiens
EVQLQQSGAEVKKPGSSVKVSCKASGGTSSTHAISWVRQAPGQGLEWMGGIIPIFGTTNYAQKFQDRVTITADESTSTAYMELSSLRSEDTAVYFCVRDGAYDSSGYYSTQWGQGTLVTVSS

SEQ ID NO: 905 - protein, 123 aa, Homo sapiens
EVQLVESGGGLVKPGGSLRLSCAASGFTFSDYYMNWVRQAPGKGLEWVSSISSSSYMYYADSMKGRFTISRDNAQNSLYLQMSSLRAEDTAVYYCARDFPGDTAVAGTGFNYWGQGTLVTVSS

SEQ ID NO: 906 - protein, 128 aa, Homo sapiens
QVQLVESGGDLVKPGRSLRLSCTASGFTIGDYAMTWFRQAPGKGLECVAVIRSRAFGGTTEYAASVKGRFIVSRDDSNSVAFLQMNSLKTEDTAVYYCSRDLRRGYYDSNGHQQFDLWGQGTLVTVSS

SEQ ID NO: 907 - protein, 136 aa, Homo sapiens
QVQLVESGGGVVQPGRSLRLSCAASGFTFSRYGMHWVRQAPGKGLEWVAVIYSDGRNEYYADSVKGRFTISRDNSKNTLHLQMNSLGAADTAVYYCARDPGPITFFDWSPDKSRKSYYDYNGMDVWGQGTTVTVSS

SEQ ID NO: 908 - protein, 116 aa, Homo sapiens
EVQLLESGGGVVQPGTSLRLSCVASGFTFSTFAMHWVRQAPGKGLEWVALISFDSTNIRYANSVRGRFTISRDNSKNTLYLEVDSLRIEDTGVYYCARDLPPLDYWGQGTLVTVSS

SEQ ID NO: 909 - protein, 129 aa, Homo sapiens
QVQLVQSGAEVRKPGSSVKLSCKASGGTFSTHAISWVRQAPGQRPEWMGGIIPIFGESKDTQKFQGRVTFTADESTTTAYMELRSLRSDDTAIYYCVRDSDPYTTTFSHNHYWYAMDVWGQGTTVTVSS

SEQ ID NO: 910 - protein, 125 aa, Homo sapiens
QVQLVQSGGGLVQPGGSLRVSCSASGFTFSSFAMHWVRQAPGKGLEYVAGISDNGHTTMYADSVKGRFTISRDNSKNTLYLQLSSLRPEDTAVYFCVKDNVILPGAIVRPQFDYWGQGTLVTVSS

SEQ ID NO: 911 - protein, 126 aa, Homo sapiens
QVQLVQSGAEVKKPGSSVKVSCKVSGGMFSDYAISWVRQAPGQRLEWMGGIMPGLGSPAYAQIFRGRVTISADISTSTAYLEVTSLRPEDTAVYYCARDPSILNTGNHHWYDLDMWGQGTTVTVSS

SEQ ID NO: 912 - protein, 125 aa, Homo sapiens
EVQLVESGGGVVQPGRSLRLSCVASGFTLAPYGMQWVRQAPGKGLEWVAFLSHDGSHLGYVDSVKGRFTISRDNSKNTLYLEMNSLRAEDTATYYCARDNVVQQNADNVGYFDFWGQGSLVTVSS

SEQ ID NO: 913 - protein, 126 aa, Homo sapiens
QVQLVQSGAEVKKPGSSVKVSCKASGGMFRDYAISWLRQAPGQRLEWMGGIMPAFGAPGYAQIFRGRATISADVSTTTAYLELTSLMPDDTAVYYCARDPSILNTGNHHWYDLDLWGQGTTVTVSS

SEQ ID NO: 914 - protein, 129 aa, Homo sapiens
QVTLKESGAEVKKPGSSVKVSCKTSGGTFSTHAISWVRQAPGQGPEWMGGIIPLFGTSQHAQRFQARVKFTADESTNTAYMELSSLTPEDTAVYYCVRDSDPYTATSRNNHYWYGMDVWGHGTTVTVSS

SEQ ID NO: 915 - protein, 126 aa, Homo sapiens
QVQLVQSGAEVKKPGSSVKVSCKASGGMFSDYAISWVRQAPGQRLEWMGGIMPGLGSPAYAQSFGGRVTISADISTSTAYLEVTSLRPEDTAVYYCARDPSILNTGNHHWYDLDMWGQGTMVTVSS

SEQ ID NO: 916 - protein, 126 aa, Homo sapiens
EVQLVESGGGLVQPGRSLRLSCSASGFSFGDYAMSWFRQAPGKGLQWVGLIKTRAYGAATDYAASVQGRFIISRDDSKSIAYLQMNSLKTEDTAVYFCAREGTSLGYYYYYAMDVWGHGTTVTVSS

SEQ ID NO: 917 - protein, 126 aa, Homo sapiens
QVQLVQSGAEVKKPGSSVKVSCKASGGMFSDYAISWVRQAPGQRLEWMGGIMPGLGSPAYAQIFRGRVTISADISTSTAYLEVTSLRPEDTAVYYCARDPSILNTGNHHWYDLDMWGQGTTVTVSS

SEQ ID NO: 918 - protein, 122 aa, Homo sapiens
EVQLVESGGGLVQPGGSLRLSCLTSGFSFSSYWMIWVRQAPGKGLEWVANIEPDGNEEYYVDSVKGRFTISRDNAKNSLYLQMNSLRAEDTAVYYCARGPIRHFGLDAFDIWGQGTTVTVSS

SEQ ID NO: 919 - protein, 129 aa, Homo sapiens
QVQLVQSGDEMKKPGSSVKVSCKASGDTFSTHAISWVRQAPGQGPEWMGGIIPLFGTASYAQTSQSRVKITADESTSTAYMELSSLTSEDTAVYYCVRDSDPYTATSRNNHYWYGMDVWGQGTTVTVSS

SEQ ID NO: 920 - protein, 126 aa, Homo sapiens; identical to SEQ ID NO: 915

SEQ ID NO: 921 - protein, 122 aa, Homo sapiens
EVQLVESGGGLVQPGGSLRLSCSASGFTFSNYAMYWVRQAPGKRPEYVSGISSNGGITYYADSVEGRFTVSRDNSKKSLYLQMSSLRPEDTAVYYCVKDLGATVTYDVFDVWGQGTMVTVSS

SEQ ID NO: 922 - protein, 120 aa, Homo sapiens
EVQLVESGGGLVQPGGSLRLSCAASGFTFSSYSMSWVRQAPGKGLEWVSGHDGGTTHYADSVKGRFTISRDDSMNTLSLQMNSLRAEDTAVYYCAKERDLPGRGGYFDHWGQGTLVTVSS

SEQ ID NO: 923 - protein, 129 aa, Homo sapiens
QVQLQQWGAGLLKPSETLSLTCAVYGGSFRGFYWTWIRQPPGKGLEWIGEVSHSGETNYNPSLKSRVTISVDTSKNQFSLNLISVTAADTSVYYCARGYTAPIIREVPITFRPRWFDPWGQGTPVTVSS

SEQ ID NO: 924 - protein, 120 aa, Homo sapiens
QVQLVQSGGGVVNPGGSMRLSCAGSGFTFSDHYMGWIRQAPGKGLEVISYISSSGSFIRDADSVKGRFTISRDNAKNSVYLQMNSLRAEDTAVYYCARMGPYGSGTFDYWGQGTLVTVSS

SEQ ID NO: 925 - protein, 123 aa, Homo sapiens
QVQLVQSGGNVVQPGGSLRLSCVGSEFSITFFAMQWVRRTPGKGLEWVALVSHDGSNIRYSDSVKGRFIISRDNAKNTLYLQLDSLTPEDTGIYYCARDHALQNGRPGYFDSWGQGSQVTVSS

SEQ ID NO: 926 - protein, 121 aa, Homo sapiens
QVQLVQSGGGLVQPGGSLRLSCSASGFTFNTYAMHWVRQAPGKRLEYVSSITRDGAGKFYADSVKGRFTISRDNSKNTLYQQMSSLRPEDTAVYYCVREGQQWLGLYFDHWGQGALVTVSS

SEQ ID NO: 927 - protein, 125 aa, Homo sapiens
QVQLVQSGAEVKKPGASVKVSCRASGYTFSGYDINWVRQATGQGLEWMGWMNPNSGDTGYAHKFQGRVTMTRNSSISTAYMELSSLTSEDTAVYFCAREKKSFGPQYYYGSGEDWGQGTLVTVSS

SEQ ID NO: 928 - protein, 127 aa, Homo sapiens
EVQLVQSGAEMKKPGESLKISCKGSGYSFPNYWIGWVRQMPGKGLEWMAIMWPSDSDTRYSPSFQGQVTISADTSTSTVYLQWGSLKASDTAMYYCVRQRYCSGGSCFLFEDAFEIWGQGTMVTVSS

SEQ ID NO: 929 - protein, 117 aa, Homo sapiens
EVQLVESGGGLVQPGGSLRLSCAASGFIFKNEPMNWIRQFPGKGLEWISNIRDNGNDVYYADSVKGRFTVSRDNAKNSLYLQMNSLRDDDTALYYCVRDTDWAFDSWGQGTLVTVSS

SEQ ID NO: 930 - protein, 125 aa, Homo sapiens
EVQLVESGPTLVKPTQTLTLTCTFSGFSLTTRRQGVGWLRRPPGKALEWLALIYWDDDKRYSPSLKSRLTITKDTSKNHVVLSLTNVGPADTATYYCAHTSELPPRRPYAAFDFWGQGTLVTVSS

SEQ ID NO: 931 - protein, 115 aa, Homo sapiens
EVQLLESGGGLVQPGGSLRLSCAASGFPFSTDAMNWVRQAPGEGLEWVSTISDSGRDTYYAASVRGRFTISRDNSKNTVYLQMNSLRVEDTAVYYCANTNFLDYWGQGTLVTVSS

SEQ ID NO: 932 - protein, 127 aa, Homo sapiens
EVQLQESGPGLLKPSETLSLTCTVSGSPIASNYWSWVRQPAGKGLEWIGRIDTSPTTDYNPSLKSRVIMSVDTSTSQFSLKMSSVTAADTAVYYCTRSFISFDSSGHPYYYYAMDVWGQGTTVTVSS

SEQ ID NO: 933 - protein, 118 aa, Homo sapiens
QVQLVQSGAEVRKPGSSVKLSCRASGGTFHTYTVNWVRQAPGQGLEWLGGIIPIFGTPTYAQRFQGKVSITADSSTNTVFMELTSLTSEDTAVYYCTRETGTDEFDFWGQGALVTVSS

SEQ ID NO: 934 - protein, 127 aa, Homo sapiens
EVQLVESGPGLVKPSGTLSLTCAVSGASVSSDHWWSWVRQSPGKGLEWIGEVYHSGSTNYNPSLKSRVTISLDQSNNQFSLKLTSVTAADTAIYYCATMWGGLCTASNCYGNPMDVWGQGTTVTVSS

SEQ ID NO: 935 - protein, 127 aa, Homo sapiens
EVQLVESGPGLVKPSGTLSLTCAVTGASVSSDHWWSWVRQSPGKGLEWIGEVYHSGSTNYNPSLKSRVTISLDQSNNQFSLKLTSVTAADTAIYYCATMWGGLCTASNCYGNPMDVWGQGTTVTVSS

SEQ ID NO: 936 - protein, 127 aa, Homo sapiens; identical to SEQ ID NO: 796

SEQ ID NO: 937 - protein, 118 aa, Homo sapiens
QVQLQESGGGLVQPGGSLRLSCEASGFSFSDFVMHWVRQVPGKGLEWVSRISHDGSITSYVDSVKGRFTVSRDNGKKTLYLQMNSPRTEDTAVYYCARDLAWTFFDYWGHGTLVTVSS

SEQ ID NO: 938 - protein, 123 aa, Homo sapiens
EVQLLESGGGLSRPGGSLRLSCAASGFIASRNCMQWVRQAPGKGLEWVSIICGDEITYIRDSVKGRFTISRDDSKNTLHLEMNSLRADDTAVYYCARATPPGGTTGWPYIDLWGQGTLVTVSS

SEQ ID NO: 939 - protein, 115 aa, Homo sapiens
EVQLLESGGGLVQPGGSLRLSCAASGFPFSTDAMNWVRQAPGEGLEWVSTISDTGRDTYYAASVKGRFTISRDNSKNTVYLQMNSLRAEDTAVYYCANTNFLDYWGQGTLVTVSS

SEQ ID NO: 940 - protein, 120 aa, Homo sapiens
EVQLVESGGGLVQPGRSLRLSCAASGFILDDYAVHWVRLAPGKGLEWVSGITWNSGYLGYADSVKGRFTISRDNAKNSLYLQMNSLRPEDTALYYCAKLGTDHPIGVDVWGQGTTVTVSS

SEQ ID NO: 941 - protein, 121 aa, Homo sapiens
QVQLVQSGGGLVQPGGSLRLSCSASGFTFNTYTMHWVRQAPGKGLEYVSAISSNGVVTYYADSVKGRFTISRDNSKNTLYLQMSSLRAEDTAVYYCVKALYSSSWCPFDYWGQGALVTVSS

SEQ ID NO: 942 - protein, 124 aa, Homo sapiens
QVQLQQSGGGLVQPGGSLRLSCEASGFNFNSYSMSWVRQAPGKGLEWLSYISSRSSTIKYASSVQGRFTVSRDNAKKSVFLQMNSLRDEDTAVYYCARELDSETYYNYNSLDVWGQGTTVTVSS

SEQ ID NO: 943 - protein, 123 aa, Homo sapiens
QVQLQESGPGLVRPSETLSLTCTVSRGSISSSYWSWIRQPPGKGLEWIGFMYYSGSTNYNPSLKSRVTISLDTSKNQFSLKLSSVTAADTAVYYCAKAQGIYYRGWSYWFDPWGQGTLVTVSS

SEQ ID NO: 944 - protein, 131 aa, Homo sapiens
EVQLVQSGAEVKKPGASVKISCKASGYAFRNNYINWIRQAPGQGLEWMGIINPSAGTSTYAQKFQGRVTMTRDTSTNTVYMEITSLRSEDTATYFCAREARRQVTQWFGEFWGPYNWFDPWGQGTLVTVSS

SEQ ID NO: 945 - protein, 124 aa, Homo sapiens
QVQLQQWGAGLLKPSETLSLTCGVYGVSFSDYYWSWIRQPPGKGLEWIGEINHSGITNYNPSLKSRVTISVDTSKNQFSLKLSSVTAADTAVYYCARGLISYTLWLRESYFDYWGQGTLVTVSS

SEQ ID NO: 946 - protein, 126 aa, Homo sapiens
QVQLVQSGAEVKKPGSSVKVSCKASGGSLRDYAISWVRQAPGQGPEWMGGIMPIFGTAGYAQKFQGRVKFTADESATTAYMELTGLRSEDSAVYFCARDPSILNTGNHHWYDLDIWGQGTTVTVSS

SEQ ID NO: 947 - protein, 118 aa, Homo sapiens
QVQLVQSGAEVKKPGASVKVSCKASGYTFTNDGFVWVRQAPGQVPEWMGWISVHTGDTIYAQRFQGRVTMTTDTSTRTSYMELMSLRSDDTAVYYCARDYGDGPPDHWGQGTLVTVSS

SEQ ID NO: 948 - protein, 124 aa, Homo sapiens
QVQLVQSGPEVKKPGSSVRVSCKVSGGPFSSYGVSWARQAPEKGLEWMGGVLPIFGTVGYVHKFQGRVTITADESTSTVYMALSSLRSEDTAVYYCVLDTTMSHPHNWYGMDVWGHGTTVTVSS

SEQ ID NO: 949 - protein, 125 aa, Homo sapiens
QVQLVQSGAEVKKPGSSMKLSCKASGINFRSYSFSWVRQAPGQGLEWMGGVIPYFPTANYAEKFRGRVTATADESTGTVYLEMSSLRSEDTAVYYCASEYFDGRSYHSFCGLDVWGQGTLVTVSS

SEQ ID NO: 950 - protein, 126 aa, Homo sapiens
QVQLVQSGAEVKKPGSSVKVSCKASGGTLSDYAISWVRQAPGQGLEWMGGIMPVFGSPGYAEIFQGRLTITADESRSTAYMELTSLRSEDTAVYYCARDPSILNTGPHHWYDLDIWGPGTTVTVSS

SEQ ID NO: 951 - protein, 129 aa, Homo sapiens
EVQLVQSGAEVKKPGSSMRVSCRVSGGTFITHAMSWVRQAPGQGPEWMGGIVPLFGRASYAQPSQTRVQITADESTSTVYLEVPSLTSEDTAVYYCVRDSEPYTATRSQNHYWYDMDVWGQGTTVTVSS

SEQ ID NO: 952 - protein, 125 aa, Homo sapiens
EVQLVESGPGLVKPSATLSLTCTVSGGSINNYYWTWVRQSAGKGLEWIGRINTSGSTNYNASLKSRVTMSIDTSKNEFSLRLSSVTAADTAVYYCAREFGVRFLDRSLFGAMDVWGHGATVTVSS

SEQ ID NO: 953 - protein, 119 aa, Homo sapiens
QVQLVESGGGVVQPGRSLRLSCAASGFTFSAFAMHWVRQAPGKGLEWVTIISYDGSNEYYADSVQGRFSISRDNSKNTLFLQMSSLRTEDTAIYYCARAGGYLSAFDIWGQGTTVTVSS

SEQ ID NO: 954 - protein, 126 aa, Homo sapiens
EVQLVQSGAEVKKPGSSVKVSCKVSGGTFSNYAISWLRQAPGQGPEWMGGIIPALSKVGYAGKFQARLTFSADELKTTVYMDLSSLTSEDTAVYYCARDPSFLNAGNHFYYDFDVWGQGTMVTVSS

SEQ ID NO: 955 - protein, 125 aa, Homo sapiens
QVQLQESGPGLVKPSGTLSLTCAVSGGSITSRDWWSWVRQPPGKGLEWIGEVYHSGSTSYNPSLKSRVTISVDKSKNEFSLKLSSVTAADTAVYYCARAGNIVVMPAAQYYFDYWGQGTLVTVSS

SEQ ID NO: 956 - protein, 127 aa, Homo sapiens
EVQLVESGGSVVQPGTSLKLSCAGSAGLTITRYAMHWVRQAPGKGLEWVALVSHDGIHIGYSDSVRGRFTISRDNSRNTLYLQMDGLRPEDTAVYYCVRDDVLQHSRPSGPGYFVSWGQGTLVTVSS

SEQ ID NO: 957 - protein, 125 aa, Homo sapiens
QVQLQESGPGLVKPSETLSLTCTVSGGSMNHYYWSWIRQPPGKGLEGIGYTYYSGSTNYNPSLKSRVTISVDASKNQFSLRLSSVTAADTAVYYCARGSQIDLRGGLGATFFDYWGQGTLVTVSS

SEQ ID NO: 958 - protein, 129 aa, Homo sapiens
QVQLVESGAEVKKPGSSVKISCKISGDTFSTNAISWLRQAPGREPEWMGGIVPLVGPASYAQRPQGRLTITADEFTNTAYLELNSLRSEDTATYYCARDSDPYTATRRHNHYWYAMDVWGQGTTVTVSS

SEQ ID NO: 959 - protein, 117 aa, Homo sapiens
EVQLLESGGGLVQPGGSLRLSCAASGFIFKNEPMNWIRQFPGKGLEWISNIRDNGNDVYYADSVKGRFTVSRDNAKNSLYLQMNSLRDDDTALYYCVRDTDWAFDSWGQGTLVTVSS

SEQ ID NO: 960 - protein, 124 aa, Homo sapiens
QVQLVQSGAEVKKPGASVKVSCKASGYTFSSYDINWVRQATGQGLEWMGWMSPNTGDTGYAHKFQGRVRMTSNTSISTAYMELNSLTSEDTAVYYCARRGNNFGYYYYYTVDVWGQGTTVTVSS

SEQ ID NO: 961 - protein, 127 aa, Homo sapiens
QVQLVQSGADVKKPGASVKVSCKASGYTFTSYYMHWVRQAPGQGLEWLGVIHPSGGSTTFAQKFQGRVTMTRDTSTSTVYMELSSLRSEDTAVYYCARVLAGSSHEWQLTHDAFDIWGQGTTVTVSS

SEQ ID NO: 962 - protein, 127 aa, Homo sapiens
EVQLLESGGGLVQPGGSLRLSCAASGFTFSSYAMSWVRQAPGKGLEWVSGIDGGGGSSYYADSVRGRFTVSRDNSKNMLHLQMNSLRADDTAVYFCAKGDWIRYFDWSLPISFFDYWGQGALVTVSS

SEQ ID NO: 963 - protein, 126 aa, Homo sapiens
EVQLLESGPGLLKPSETLSLTCTVSGDSVSSGNFYWSWVRRPPGKALEWIAYSHYTGGTNSDPSFMGRVTMSIDPSRNQFSLRLTSVAAADTAVYYCARTTSPLTYSGHWPLFDYWGQGSLVTVSS

SEQ ID NO: 964 - protein, 129 aa, Homo sapiens; identical to SEQ ID NO: 919

SEQ ID NO: 965 - protein, 126 aa, Homo sapiens
QVQLVQSGAEVKKPGSSVKVSCKASGGMFTDYAISWVRQAPGQRLEWMGGIMPGLGSPAYAQIFRDRATISADVSTSTAYLELTSLKPEDTAVYYCARDPSILNTGNHHWYDLDIWGQGTTVTVSS

SEQ ID NO: 966 - protein, 126 aa, Homo sapiens
QVQLVQSGAEVKKPGSSVKVSCKASGGMFTDYAISWVRQAPGQRPEWMGGIMPGLGSPAYAQIFRGRATISADLSTSTAYLELTSLKPEDTAVYYCARDPSILNTGNHHWYDLDIWGQGTMVTVSS

SEQ ID NO: 967 - protein, 122 aa, Homo sapiens
QVTLKESGGGLVQPGGSLRLSCAASGFTVNSYGMSWVRQAPGKGLEWVSGFKSRSDRPDYAESVKGRFTISRDTSKNTVYLEMIGLRAEDTATYYCVRMDWMEWMKYYFDSWGQGALVTVSS

SEQ ID NO: 968 - protein, 126 aa, Homo sapiens
QVQLVQSGAEVKKPGSSVKVSCKASGGMISDYAISWVRQAPGQRLEWMGGIMPAFGSPGYAQIFRGRATISADVSTNTAYLELTSLNPDDTAVYYCARDPSILNTGNHHWYDLDMWGQGTMVTVSS

SEQ ID NO: 969 - protein, 127 aa, Homo sapiens
QVQLVESGGSVVQPGTSLKLSCAGSAGLTITRYAMHWVRQAPGKGLEWVALVSHDGIHIGYSDSVRGRFTISRDNSRNTLYLQMDGLRPEDTAVYYCVRDDVLQHSRPSGPGYFVSWGQGTLVTVSS

SEQ ID NO: 970 - protein, 127 aa, Homo sapiens; identical to SEQ ID NO: 796

SEQ ID NO: 971 - protein, 116 aa, Mus musculus
EVKLEESGGGLVQPGGSMKFSCVASGFTFSDYWMNWVRQSPDKGLEWVAEIRLKSNNYATHYAASVKGRFTISRDDSKSSVYLQMNNLRAEDSGIYYCTRSAMDYWGQGTSVTVSS

SEQ ID NO: 972 - protein, 111 aa, Mus musculus
QIQLVQSGPELKKPGETVKISCKASGYTFTDYSMHWVKQAPGKGSKWMGWINTETGEPTYADDFKGRFAFSLETSASTAYLQINNLKNEDTATYFCALRRWGQGTLVTVSS

SEQ ID NO: 973 - protein, 111 aa, Mus musculus
QIQLVQSGPELKKPGETVKISCKASGYTFTDYSMHWVKQAPGKGSKWMGWINTETGEPTYADDFKGRFAFSLETSASTAYLQINNLKNEDTATYFCALRRWGQGTLVTVSA

SEQ ID NO: 974 - protein, 111 aa, Mus musculus; identical to SEQ ID NO: 973

SEQ ID NO: 975 - protein, 120 aa, Mus musculus
EVQLVESGGGLVQPGGSLKLSCAASGFTFSNYGMSWVRQTPDKRLELVATINRNGGSTYYLDSVKVRFTISRDNAKSTLFLQLSSLKSDDTAMYYCARIYDFDEDYFDVWGAGTTVTVSS

SEQ ID NO: 976 - protein, 120 aa, Homo sapiens
EVQLLESGGGLVQPGGSLRLSCAASGFTFRNYAMTWVRQAPGKGLEWVSGISDSGDRTYNADSVKGRFSISRDNSKNTLHLQMNSLRAEDTAVYYCALASGSYFGGANYWGQGTLVTVSS

SEQ ID NO: 977 - protein, 119 aa, Homo sapiens
EVQLVESGGGLVQPGGSLRLSCAASGFTVSSNYMSWVRQAPGRGLEWVSVIYSGGSTFYADSVKGRFTISRDNSKNTLYLQMNSLRPEDTAVYYCATGARFGESPFDYWGQGTLVTVSS

SEQ ID NO: 978 - protein, 119 aa, Homo sapiens
EVQLVESGGGLVQPGGSLRLSCAASGFTVSSNYMSWVRQAPGKGLEWVSVIYSGGSTYYADSVKGRFTISRDNSKNTLYLQMNSLRAEDTAVYYCATGARFGESPFDYWGQGTLVTVSS

SEQ ID NO: 979 - protein, 130 aa, Homo sapiens
QVQLVQSGAEVKKPGSSVKVSCKASGGTFSRYTIIWVRQAPGQGLEWMGRIIPILDIANYAQKFQGRVTITADKSTSTAYMELSSLRSEDTAVYYCAREGGLDYFGSRNSGWTYTWFDPWGQGTLVTVSS

SEQ ID NO: 980 - protein, 128 aa, Homo sapiens
QLQVQESGPGLVKPSETLSLTCTVSGASISSNHYFWGWIRQPPGKGLAWIGSMHYSGSTYYNPSLKSRVTISVDTSKNQLSLKLSSVTAADTAVYYCARGVNYYDRNGYYRNDGFDIRGQGTMVTVSS

SEQ ID NO: 981 - protein, 122 aa, Homo sapiens
EVQLVESGGGLVQPGGSLRLSCAASGFTFSSYSMNWVRQAPGKGLEWVSYISSSSNTRYYTDSVMGRFTISRDNAKNSLFLQMNSLRAEDTAVYYCASSKGFCSGGSCSDYWGQGTLVTVSS

SEQ ID NO: 982 - protein, 124 aa, Homo sapiens
EVQLVESGGHLVQPGRSLRLSCAASGFTFDDYAMHWVRQVPGKGLEWVSGISWNGGILDYADSVKGRFTISRDNAKNSLYLHMRSLRTDDTALYYCAKDLRRQDYYADWYFDLWGRGTLVTVSS

SEQ ID NO: 983 - protein, 128 aa, Homo sapiens; identical to SEQ ID NO: 980

SEQ ID NO: 984 - protein, 124 aa, Homo sapiens
EVQLVESGGHLVQPGRSLRLSCAASGFTFDDYAMHWVRQVPGKGLEWVSGISWNGGILGYADSVKGRFTISRDNAKNSLYLQMRSLRTDDTALYYCAKDLRRQDYYADWYFDLWGRGTLVTVSS

SEQ ID NO: 985 - protein, 128 aa, Homo sapiens; identical to SEQ ID NO: 980

SEQ ID NO: 986 - protein, 118 aa, Homo sapiens
QVQLVQSGSELKKPGASVKISCKASGYIFINYAMNWVRQAPGQGLEWMGWINTNTGNPTYAQDFTGRFVFSLDTSLSTAYLQISSLEAEDTAVYYCAKIGSRNSLGVWGQGTLVTVSA

SEQ ID NO: 987 - protein, 123 aa, Homo sapiens
QMQLVQSGPEVKKPGTSVKVSCKASGFTFTSSAVQWVRQARGQRLEWIGWIVVGSGNTDYAQKFQERVTITRDVSTSTAYMELSSLRSEDTAVYYCAAPRCSGGSCYDGFDIWGQGTMVTVSS

SEQ ID NO: 988 - protein, 121 aa, Lama pacos
QVQLVESGGGLVQAGGSLRLSCAASGFPVANTWMEWYRQAPGKEREWVAAITSYGYRTYYADSVKGRFTISRDNAKNTVYLQMNSLKPEDTAVYYCNVKDEGATTKVYDYWGQGTQVTVSS

SEQ ID NO: 989 - protein, 121 aa, Lama pacos
QVQLVESGGGLVQAGGSLRLSCAASGFPVMYTHMHWYRQAPGKEREWVAAIVSLGEYTTYADSVKGRFTISRDNAKNTVYLQMNSLKPEDTAVYYCNVKDWGAANKYYDYWGQGTQVTVSS

SEQ ID NO: 990 - protein, 121 aa, Lama pacos
QVQLVESGGGLVQAGGSLRLSCAASGFPVEVWRMEWYRQAPGKEREGVAAIESYGHGTRYADSVKGRFTISRDNAKNTVYLQMNSLKPEDTAVYYCNVKDDGQLAYHYDYWGQGTQVTVSS

SEQ ID NO: 991 - protein, 121 aa, Lama pacos
QVQLVESGGGLVQAGGSLRLSCAASGFPVEVWRMEWYRQAPGKEREGVAAIESYGWGTRYADSVKGRFTISRDNAKNTVYLQMNSLKPEDTAVYYCNVKDDGQLAYHYDYWGQGTQVTVSS

SEQ ID NO: 992 - protein, 121 aa, Lama pacos
QVQLVESGGGLVQAGGSLRLSCAASGFPVEVWRMEWYRQAPGKEREGVAAIESYGHGTRYADSVKGRFTISRDNAKNTVYLQMNSLKPEDTAVYYCNVWDDGQLAYHYDYWGQGTQVTVSS

SEQ ID NO: 993 - protein, 121 aa, Lama pacos
QVQLVESGGGLVQAGGSLRLSCAASGFPVEVWRMEWYRQAPGKEREGVAAIESYGHGTRYADSVKGRFTISRDNAKNTVYLQMNSLKPEDTAVYYCNVYDDGQLAYHYDYWGQGTQVTVSS

SEQ ID NO: 994 - protein, 121 aa, Lama pacos
QVQLVESGGGLVQAGGSLRLSCAASGFPVYFSYMAWYRQAPGKEREWVAAINSEGDSTTYADSVKGRFTISRDNAKNTVYLQMNSLKPEDTAVYYCNVKDYGWYNSQYDYWGQGTQVTVSS

SEQ ID NO: 995 - protein, 120 aa, Lama pacos
QVQLVESGGGLVQAGGSLRLSCAASGFPVNAHFMYWYRQAPGKEREWVAAIYSYGRTLYADSVKGRFTISRDNAKNTVYLQMNSLKPEDTAVYYCNVKDYGAASWEYDYWGQGTQVTVSS

SEQ ID NO: 996 - protein, 121 aa, Lama pacos
QVQLVESGGGLVQAGGSLRLSCAASGFPMYAWEMAWYRQAPGKEREWVAAIRSMGVHTHYSDSVKGRFTISRDNAKNTVYLQMNSLKPEDTAVYYCNVKDFGGHQAYYDYWGQGTQVTVSS

SEQ ID NO: 997 - protein, 121 aa, Lama pacos
QVQLVESGGGLVQAGGSLRLSCAASGFPVEDTWMEWYRQAPGKEREWVAAITSWGFKTYYADSVKGRFTISRDNAKNTVYLQMNSLKPEDTAVYYCNVKDEGDTSASYDYWGQGTQVTVSS

SEQ ID NO: 998 - protein, 120 aa, Lama pacos
QVQLVESGGGLVQAGGSLRLSCAASGFPVNSWMEWYRQAPGKEREWVAAITSYGYKTYYADSVKGRFTISRDNAKNTVYLQMNSLKPEDTAVYYCNVKDEGYFSDEYDYWGQGTQVTVSS

SEQ ID NO: 999 - protein, 121 aa, Lama pacos
QVQLVESGGGLVQAGGSLRLSCAASGFPVEWAHMHWYRQAPGKEREWVAAIVSAGHYTVYADSVKGRFTISRDNAKNTVYLQMNSLKPEDTAVYYCNVKDWGSSNQYYDYWGQGTQVTVSS

SEQ ID NO: 1000 - protein, 130 aa, Lama pacos
DVQLQESGGDLVQPGGSLRLSCAASGFTLDYYAIGWFRQAPGKEREGVSCISSSDGSTYYADSVKGRFTSSRDNAKNTVYLQMNSLKPEDTAVYYCAAVPSTYYNGSYYYTCHPGGMDYWGKGTQVTVSS

SEQ ID NO: 1001 - protein, 130 aa, Lama pacos
DVQLQESGGGLVQPGGSLRLSCAVSGFTLDYYAIGWFRQAPGKEREGVSCISSSDGSTYYADSVKGRFTSSRDNAKNTVYLQMNSLKPEDTAVYYCAAVPSTYYSGTYYYNCHPGGMDYWGKGTQVTVSS

SEQ ID NO: 1002 - protein, 130 aa, Lama pacos
DVQLQESGGGLVQPGGSLRLSCAASGLTLDYYTIGWFRQAPGKEREGVSCISSSDDSTYYADSVKGRFTISRDNAKNTVYLQMNSLKPEDTAVYYCATAPGTYYKGSYYPMCHYYGMDYWGKGTQVTVSS

SEQ ID NO: 1003 - protein, 130 aa, Lama pacos
DVQLQESGGGLVQPGGSLRLSCAVSGFTLDYYAIGWFRQAPGKEREGVACISSSDGTTYYADSVKGRFTISRDNAKNTVYLQMNSLKPEDTAVYYCATRPLTYYSGSYYTTCSDYGMDYWGKGTLVTVSS

SEQ ID NO: 1004 - protein, 130 aa, Lama pacos
DVQLQESGGGLVQPGGSLRLSCAASGFTLDYYAIGWFRQAPGKEREGVSCISNSDGSTYYADSVKGRFTTSRDNAKNTVYLQMNSLKPEDTAVYYCAAVPSTYYSGSYYYTCHPGGMDYWGKGTQVTVSS

SEQ ID NO: 1005 - protein, 130 aa, Lama pacos
DVQLQESGGGLVQSGGSLRLSCAASGFTLDYYAIGWFRQAPGKEREGVSCISNSDGSTYYADSVKGRFTTSRDNAKNTVYLQMNSLKPEDTAVYYCAAVPSTYYSGSYYYTCHPGGMDYWGKGTQVTVSS

SEQ ID NO: 1006 - protein, 130 aa, Lama pacos
DVQLQESGGGLVQPGGSLRLSCAASGFTLDYYAIGWFRQAPGKEREGVSCISNSDGSTYYADSVKGRFTTSRDNAKNTVYLQMNSLKPEDTAVYYCAAVPSTYYSGSYYYTCHPGGMDYWGKGTLVTVSS

SEQ ID NO: 1007 - protein, 130 aa, Lama pacos
DVQLQESGGGLVQPGGSLRLSCAASGFTLDYYAIGWFRQAPGKEREGVSCISNSGGSTYYADSVKGRFTTSRDNAKNTVYLQMNSLKPEDTAVYYCAAVPSTYYSGSYYYTCHPGGMDYWGKGTQVTVSS

SEQ ID NO: 1008 - protein, 130 aa, Lama pacos
DVQLQESGGGLVQSGGSLRLSCAASGFTLDYYAIGWFRQAPGKEREGVSCITNSDGSTYYADSVKGRFTTSRDNAKNTVYLQMNSLKPEDTAVYYCASFPSTYYSGSYYYTCHPGGMDYWGKGTQVTVSS

SEQ ID NO: 1009 - protein, 133 aa, Lama pacos
DVQLQESGGGLVQPGGSLRLSCAASGFTLDYYAIGWFRQAPGKEREGVSCISSSDGSTYYADSVKGRFTISRDNAKNTVYLQMNSLKPDDTAVYYCAAALSEGGYTIDGSSWCYHSVYGMDYWGKGTQVTVSS

SEQ ID NO: 1010 - protein, 130 aa, Lama pacos
DVQLQESGGGSVEAGGSLRLSCAASGVTLDYYAIGWFRQAPGKEREGVSCISSSDGSTYYADSVKGRFTTSRDNAKNTVYLQMNSLKPEDTADYYCAAVPSTYYSGTYYYNCHPGAMHYWGKGTQVTVSS

SEQ ID NO: 1011 - protein, 130 aa, Lama pacos [sequence omitted]

SEQ ID NO: 1012 - protein, 130 aa, Lama pacos
DVQLQESGGGLVQPGGSLRLSCAASGLTLDYYAIGWFRQAPGKEREGVSCISSSDGSTYYADSVKGRFTTSRDNAKNTVYLQMNSLKPEDTAVYYCAAVPSTYYSGTYYYTCHPGGMDYWGKGTLVTVSS

SEQ ID NO: 1013 - protein, 127 aa, Homo sapiens
QVQLQESGPGLVKPSETLSLTCTVSGYSISSGYYWGWIRQPPGKGLEWIGSIYHSGSTYYNPSLKTRVTISVDTSKNQFSLKLSSVTAADTAVYYCARAVVGIVVVPAAGRRAFDIWGQGTMVTVSS

SEQ ID NO: 1014 - protein, 127 aa, Homo sapiens [sequence omitted]

SEQ ID NO: 1015 - protein, 114 aa, Lama pacos
QVQLVESGGGLVQAGGSLRLSCAASGFPVRKANMHWYRQAPGKEREWVAAIMSKGEQTVYADSVEGRFTISRDNAKNTVYLQMNSLKPEDTAVYYCRVFVGWHYFGQGTQVTVS

SEQ ID NO: 1016 - protein, 114 aa, Lama pacos
QVQLVESGGGLVQAGGSLRLSCAASGFPVQSHYMRWYRQAPGKEREWVAAIESTGHHTAYADSVKGRFTISRDNAKNTVYLQMNSLKPEDTAVYYCTVYVGYEYHGQGTQVTVS

SEQ ID NO: 1017 - protein, 114 aa, Lama pacos
QVQLVESGGGLVQAGGSLRLSCAASGFPVETENMHWYRQAPGKEREWVAAIYSHGMWTAYADSVKGRFTISRDNTKNTVYLQMNSLKPEDTAVYYCEVEVGKWYFGQGTQVTVS

SEQ ID NO: 1018 - protein, 114 aa, Lama pacos
QVQLVESGGGLVQAGGSLRLSCAASGFPVKASRMYWYRQAPGKEREWVAAIQSFGEVTWYADSVKGRFTISRDNAKNTVYLQMNSLKPEDTAVYYCYVWVGQEYWGQGTQVTVS

SEQ ID NO: 1019 - protein, 114 aa, Lama pacos
QVQLVESGGGLVQAGGSLRLSCAASGFPVYASNMHWYRQAPGKEREWVAAIESQGYMTAYADSVKGRFTISRDNAKNTVYLQMNSLKPEDTAVYYCWVIVGEYYVGQGTQVTVS

SEQ ID NO: 1020 - protein, 114 aa, Lama pacos
QVQLVESGGGLVQAGGSLRLSCAASGFPVQAREMEWYRQAPGKEREWVAAIKSTGTYTAYAYSVKGRFTISRDNAKNTVYLQMNSLKPEDTAVYYCYVYVGSSYIGQGTQVTVS

SEQ ID NO: 1021 - protein, 114 aa, Lama pacos
QVQLVESGGGLVQAGGSLRLSCAASGFPVKNFEMEWYRKAPGKEREWVAAIQSGGVETYYADSVKGRFTISRDNAKNTVYLQMNSLKPEDTAVYYCFVYVGRSYIGQGTQVTVS

SEQ ID NO: 1022 - protein, 115 aa, Lama pacos
QVQLVESGGGLVQAGGSLRLSCAASGFPVAYKTMWWYRQAPGKEREWVAAIESYGIKWTRYADSVKGRFTISRDNAKNTVYLQMNSLKPEDTAVYYCIVWVGAQYHGQGTQVTVS

SEQ ID NO: 1023 - protein, 114 aa, Lama pacos
QVQLVESGGGLVQAGGSLRLSCAASGFPVAGRNMWWYRQAPGKEREWVAAIYSSGTYTEYADSVKGRFTISRDNAKNTVYLQMNSLKPEDTAVYYCHVWVGSLYKGQGTQVTVS

SEQ ID NO: 1024 - protein, 114 aa, Lama pacos
QVQLVESGGGLVQAGGSLRLSCAASGFPVKHARMWWYRQAPGKEREWVAAIDSHGDTTWYADSVKGRFTISRDNAKNTVYLQMNSLKPEDTAVYYCYVYVGASYWGQGTQVTVS

SEQ ID NO: 1025 - protein, 114 aa, Lama pacos
QVQLVESGGGLVQAGGSLRLSCAASGFPVNSHEMTWYRQAPGKEREWVAAIQSTGTVTEYADSVKGRFTISRDNAKNTVYLQMNSLKPEDTAVYYCYVYVGSSYLGQGTQVTVS

SEQ ID NO: 1026 - protein, 115 aa, Lama pacos
QVQLVESGGGLVQAGGSLRLSCATSGFPVYQANMHWYRQAPGKEREWVAAIQSYGDGTHYADSVKGRFTISRDNAKNTVYLQMNSLKPEDTAVYYCRAVYVGMHYFGQGTQVTVS

SEQ ID NO: 1027 - protein, 114 aa, Lama pacos
QVQLVESGGGLVQAGGSLRLSCAASGFPVEQREMEWYRQAPGKEREWVAAIDSNGNYTFYADSVKGRFTISRDNAKNTVYLQMNSLKPEDTAVYYCYVYVGKSYIGQGTQVTVS

SEQ ID NO: 1028 - protein, 114 aa, Lama pacos
QVQLVESGGGLVQAGGSLRLSCAASGFPVKHHWMFWYRQAPGKEREWVAAIKSYGYGTEYADSVKGRFTISRDNAKNTVYLQMNSLKPEDTAVYYCFVGVGTHYAGQGTQVTVS

SEQ ID NO: 1029 - protein, 114 aa, Lama pacos
QVQLVESGGGLVQAGGSLRLSCAASGFPVYAAEMEWYRQAPGKEREWVAAISSQGTITYYADSVKGRFTISRDNAKNTVYLQMNSLKPEDTAVYYCFVYVGKSYIGQGTQVSVS

SEQ ID NO: 1030 - protein, 114 aa, Lama pacos; identical to SEQ ID NO: 1029

SEQ ID NO: 1031 - protein, 120 aa, Lama pacos
QVQLVESGGGLVQAGGSLRLSCAASGFPVHAWEMAWYRQAPGKEREWVAAIRSFGSSTHYADSVKGRFTISRDNAKNTVYLQMNSLKPEDTAVYYCNVKDFGTHHYAYDYWGQGTQVTVS

SEQ ID NO: 1032 - protein, 120 aa, Lama pacos
QVQLVESGGGLVQAGGSLRLSCAASGFPVNTWWMHWYRQAPGKEREWVAAITSWGFRTYYADSVKGRFTISRDNAKNTVYLQMNSLKPEDTAVYYCNVKDKGMAVQWYDYWGQGTQVTVS

SEQ ID NO: 1033 - protein, 120 aa, Lama pacos
QVQLVESGGGLVQAGGSLRLSCAASGFPVYNTWMEWYRQAPGKEREWVAAITSHGYKTYYADSVKGRFTISRDNAKNTVYLQMNSLKPEDTAVYYCNVKDEGDMFTAYDYWGQGTQVTVS

SEQ ID NO: 1034 - protein, 120 aa, Lama pacos
QVQLVESGGGLVQAGGSLRLSCAASGFPVYHSTMFWYRQAPGKEREWVAAIYSSGQHTYYADSVKGRFTISRDNAKNTVYLQMNSLKPEDTAVYYCNVKDSGQWRQEYDYWGQGTQVTVS

SEQ ID NO: 1035 - protein, 119 aa, Lama pacos
QVQLVESGGGLVQAGGSLRLSCAASGFPVEHEMAWYRQAPGKEREWVAAIRSMGRKTLYADSVKGRFTISRDNAKNTVYLQMNSLKPEDTAVYYCNVKDFGYTWHEYDYWGQGTQVTVS

SEQ ID NO: 1036 - protein, 114 aa, Lama pacos
QVQLVESGGGLVQAGGSLRLSCAASGFPVNYKTMWWYRQAPGKEREWVAAIWSYGHTTHYADSVKGRFTISRDNAKNTVYLQMNSLKPEDTAVYYCVVWVGHNYEGQGTQVTVS

SEQ ID NO: 1037 - protein, 120 aa, Lama pacos
QVQLVESGGGLVQAGGSLRLSCAASGFPVTMAWMWWYRQAPGKEREWVAAIRSEGVRTYYADSVKGRFTISRDNAKNTVYLQMNSLKPEDTAVYYCNVKDYGQAHAYYDYWGQGTQVTVS

SEQ ID NO: 1038 - protein, 120 aa, Lama pacos
QVQLVESGGGLVQAGGSLRLSCAASGFPVNSHFMEWYRQAPGKEREWVAAIQHSSGFHTYYADSVKGRFTISRDNAKNTVYLQMNSLKPEDTAVYYCNVKDTGTTEDYDYWGQGTQVTVS

SEQ ID NO: 1039 - protein, 120 aa, Lama pacos
QVQLDESGGGLVQAGGSLRLSCAASGFPVYHAWMEWYRQAPGKEREWVAAITSSGRHTYYADSVKGRFTISRDNAKNTVYLQMNSLKPEDTAVYYCNVKDAGRVYNSYDYWGQGTQVTVS

SEQ ID NO: 1040 - protein, 120 aa, Lama pacos
QVQLVESGGGLVQAGGSLRLSCAASGFPVAHAWMEWYRQAPGKEREWVAAITSYGYKTYYADSVKGRFTISRDNAKNTVYLQMNSLKPEDTAVYYCNVKDTGTYRFYYDYWGQGTQVTVS

SEQ ID NO: 1041 - protein, 119 aa, Lama pacos
QVQLVESGGGLVQAGGSLRLSCAASGFPVWNQTMVWYRQAPGKEREWVAAIWSMGHTYYADSVKGRFTISRDNAKNTVYLQMNSLKPEDTAVYYCNVKDAGVYNRYYDYWGQGTQVTVS

SEQ ID NO: 1042 - protein, 120 aa, Lama pacos
QVQLVESGGGLVQAGGSLRLSCAASGFPVEHYWMEWYRQAPGKEREWVAAITSFGYRTYYADSVKGRFTISRDNAKNTVYLQMNSLKPEDTAVYYCNVKDWGFASHAYDYWGQGIQVTVS

SEQ ID NO: 1043 - protein, 120 aa, Lama pacos
QVQLVESGGGLVQAGGSLRLSCAASGFPEIAWEMAWYRQAPGKEREWVAAIRSFGERTLYADSVKGRFTISRDNAKNTVYLQMNSLKPEDTAVYYCNVKDFGWQHQEYDYWGQGTQVTVS

SEQ ID NO: 1044 - protein, 120 aa, Lama pacos
QVQLVESGGGLVQAGGSLRLSCAASGFPVYHAYMEWYRQAPGKEREWVAAIYSNGEHTYYADSVKGRFTISRDNAKNTVYLQMNSLKPEDTAVYYCNVKDSGSFNQAYDYWGQGTQVTVS

SEQ ID NO: 1045 - protein, 120 aa, Lama pacos
QVQLVESGGGLVQAGGSLRLSCAASGFPVEWSHMHWYRQAPGKEREWVAAIVSKGGYTLYADSVKGRFTISRDNAKNTVYLQMNSLKPEDTAVYYCNVKDYGVHFKRYDYWGQGTQVTVI

SEQ ID NO: 1046 - protein, 120 aa, Lama pacos
QVQLVESGGGLVQAGGSLRLSCAASGFPVFHVWMEWYRQAPGKEREWVAAIDSAGWHTYYADSVKGRFTISRDNAKNTVYLQMNSLKPEDTAVYYCNVKDAGNTTSAYDYWGQGTQVTVS

SEQ ID NO: 1047 - protein, 114 aa, Lama pacos
QVQLVESGGGLVQAGGSLRLSCAASGFPVYAQNMHWYRQAPGKEREWVAAIYSHGYWTLYADSVKGRFTISRDNAKNTVYLQMNSLKPEDTAVYYCEVQVGAWYTGQGTQVTVS

SEQ ID NO: 1048 - protein, 120 aa, Lama pacos
QVQLVESGGGLVQAGGSLRLSCAASGFPVYYNWMEWYRQAPGKEREWVAAIHSNGDETFYADSVKGRFTISRDNAKNTVYLQMNSLKPEDTAVYYCNVKDIDAEAYAYDYWGQGTQVTVS

SEQ ID NO: 1049 - protein, 120 aa, Lama pacos
QVQLVESGGGLVQAGGSLRLSCAASGFPVYHVWMEWYRQAPGKEREWVAAITSSGSHTYYADSVKGRFTISRDNAKNTVYLQMNSLKPEDTAVYYCNVKDSGQWRVQYDYWGQGTQVTVS

SEQ ID NO: 1050 - protein, 120 aa, Lama pacos
QVQLVESGGGLVQAGGSLRLSCAASGFPVYWHHMHWYRQAPGKEREWVAAIISWGWYTTYADSVKGRFTISRDNAKNTVYLQMNSLKPEDTAVYYCNVKDHGAQNQMYDYWGQGTQVTVS

SEQ ID NO: 1051 - protein, 120 aa, Lama pacos
QVQLVESGGGLVQAGGSLRLSCAASGFPVYRDRMAWYRQAPGKEREWVAAIYSAGQQTRYADSVKGRFTISRDNAKNTVYLQMNSLKPEDTAVYYCNVKDVGHHYEYYDYWGQGTQVTVS

SEQ ID NO: 1052 - protein, 120 aa, Lama pacos
QVQLVESGGGLVQAGGSLRLSCAASGFPVDNGYMHWYRQAPGKEREWVAAIDSYGWHTIYADSVKGRFTISRDNAKNTVYLQMNSLKPEDTAVYYCNVKDKGQMRAAYDYWGQGTQVTVS

SEQ ID NO: 1053 - protein, 120 aa, Lama pacos
QVQLVESGGGLVQAGGSLRLSCAASGFPVSWHSMYWYRQAPGKEREWVAAIFSEGDWTYYADSVKGRFTISRDNAKNTVYLQMNSLKPEDTAVYYCNVKDYGSSYYKYDYWGQGTQVTVS

SEQ ID NO: 1054 - protein, 120 aa, Lama pacos
QVQLVESGGGLVQAGGSLRLSCAASGFPVSQSVMAWYRQAPGKEREWVAAIYSKGQYTHYADSVKGRFTISRDNAKNTVYLQMNSLKPEDTAVYYCNVKDAGSSYWDYDYWGQGTQVTVS

SEQ ID NO: 1055 - protein, 124 aa, Lama pacos
QVQLVESGGGSVQAGGSLRLSCAASGSIGQIEYLGWFRQAPGKEREGVAALNTWTGRTYYADSVKGRFTVSLDNAKNTVYLQMNSLKPEDTALYYCAAARWGRTKPLNTYYYSYWGQGTPVTVS

SEQ ID NO: 1056 - protein, 114 aa, Lama pacos
QVQLVESGGGLVQAGGSLRLSCAASGFPVFSGHMHWYRQAPGKEREWVAAILSNGDSTHYADSVKGRFTISRDNAKNTVYLQMNSLKPEDTAVYYCRVHVGAHYFGQGTQVTVS

SEQ ID NO: 1057 - protein, 123 aa, Lama pacos
QVQLVESGGGSVQAGGSLRLSCAASGYIDKIVYLGWFRQAPGKEREGVAALYTLSGHTYYADSVKGRFTVSLDNAKNTVYLQMNSLKPEDTALYYCAAATEGHAHALYRLHYYWGQGTQVTVS

SEQ ID NO: 1058 - protein, 114 aa, Lama pacos
QVQLVESGGGLVQAGGSLRLSCAASGFPVYQGEMHWYRQAPGKEREWVAAIRSTGVQTWYADSVKGRFTISRDNAKNTVYLQMNSLKPEDTAVYYCRVWVGTHYFGQGTQVTVS

SEQ ID NO: 1059 - protein, 124 aa, Lama pacos
QVQLVESGGGSVQAGGSLRLSCAASGNIQRIYYLGWFRQAPGKEREGVAALMTYTGHTYYADSVKGRFTVSLDNAKNTVYLQMNSLKPEDTALYYCAAAYVGAENPLPYSMYGYWGQGTQVTVS

SEQ ID NO: 1060 - protein, 124 aa, Lama pacos
QVQLVESGGGSVQAGGSLRLSCAASGQISHIKYLGWFRQAPGKEREGVAALITRWGQTYYADSVKGRFTVSLDNAKNTVYLQMNSLKPEDTALYYCAAADYGASDPLWFIHYLYWGQGTQVTVS

SEQ ID NO: 1061 - protein, 124 aa, Lama pacos
QVQLVESGGGSVQAGGSLRLSCAASGKIWTIKYLGWFRQAPGKEREGVAALMTRWGYTYYADSVKGRFTVSLDNAKNTVYLQMNSLKPEDTALYYCAAANYGSNFPLAEEDYWYWGQGTQVTVS

SEQ ID NO: 1062 - protein, 125 aa, Lama pacos
QVQLVESGGGSVQAGGSLRLSCAASGNISQIHYLGWFRQAPGKEREGVAALNTDYGYTYYADSVKGRFTVSLDNAKNTVYLQMNSLKPEDTALYYCAAAYYFGDDIPLWWEAYSYWGQGTQVTVS

SEQ ID NO: 1063 - protein, 124 aa, Lama pacos
QVQLVESGGGSVQAGGSLRLSCAASGNISTIEYLGWFRQAPGKEREGVAALYTWHGQTYYADSVKGRFTVSLDNAKNTVYLQMNSLKPEDTALYYCAAARWGRHMPLSATEYSYWGQGTQVTVS

SEQ ID NO: 1064 - protein, 124 aa, Lama pacos
QVQLVESGGGSVQAGGSLRLSCAASGNIESIYYLGWFRQAPGKEREGVAALWTGDGETYYADSVKGRFTVSLDNAKNTVYLQMNSLKPEDTALYYCAAAAWGNSAPLTTYRYYYWGQGTQVTVS

SEQ ID NO: 1065 - protein, 114 aa, Lama pacos
QVQLVESGGGLVQAGGSLRLSCAASGFPVEQGRMYWYRQAPGKEREWVAAIISHGTVTVYADSVKGRFTISRDNAKNTVYLQMNSLKPEDTAVYYCYVYVGAQYWGQGTQVTVS

SEQ ID NO: 1066 - protein, 124 aa, Lama pacos
QVQLVESGGGSVQAGGSLRLSCAASGFIYGITYLGWFRQAPGKEREGVAALVTWNGQTYYADSVKGRFTVSLDNAKNTVYLQMNSLKPEDTALYYCAAADWGYDWPLWDEWYWYWGQGTQVTVS

SEQ ID NO: 1067 - protein, 124 aa, Lama pacos
QVQLVESGGGSVQAGGSLRLSCAASGTIADIKYLGWFRQAPGKEREGVAALMTRWGSTYYADSVKGRFTVSLDNAKNTVYLQMNSLKPEDTALYYCAAANYGANYPLYSQQYSYWGQGTQVTVS

SEQ ID NO: 1068 - protein, 124 aa, Lama pacos
QVQLVESGGGSVQAGGSLRLSCAASGSISSIKYLGWFRQAPGKEREGVAALMTRWGMTYYADSVKGRFTVSLDNAKNTVYLQMNSLKPEDTALYYCAAANYGANEPLQYTHYNYWGQGTQVTVS

SEQ ID NO: 1069 - protein, 124 aa, Lama pacos
QVQLVESGGGSVQAGGSLRLSCAASGEIESIFYLGWFRQAPGKEREGVAALYTYVGQTYYADSVKGRFTVSLDNAKNTVYLQMNSLKPEDTALYYCAAASYGAAHPLSIMRYYYWGQGTQVTVS

SEQ ID NO: 1070 - protein, 124 aa, Lama pacos
QVQLVESGGGSVQAGGSLRLSCAASGTIAHIKYLGWFRQAPGKEREGVAALMTKWGQTYYADSVKGRFTVSLDNAKNTVYLQMNSLKPEDTALYYCAAASYGANFPLKASDYSYWGQGTQVTVS

SEQ ID NO: 1071 - protein, 124 aa, Lama pacos
QVQLVESGGGSVQAGGSLRLSCAASGSIQAITYLGWFRQAPGKEREGVAALVTWNGQTYYADSVKGRFTVSLDNAKNTVYLQMNSLKPEDTALYYCAAADWGYDWPLWDEWYWYWGQGTQVTVS

SEQ ID NO: 1072 - protein, 124 aa, Lama pacos
QVQLVESGGGSVQAGGSLRLSCAASGSISSITYLGWFRQAPGKEREGVAALVTYSGNTYYADSVKGRFTVSLDNAKNTVYLQMNSLKPEDTALYYCAAATWGHSWPLYNDEYWYWGQGSQVTVS

SEQ ID NO: 1073 - protein, 124 aa, Lama pacos
QVQLVESGGGSVQAGGSLRLSCAASGSISSITYLGWFRQAPGKEREGVAALITVNGHTYYADSVKGRFTVSLDNAKNTVYLQMNSLKPEDTALYYCAAAAWGYAWPLHQDDYWYWGQGTQVTVS

SEQ ID NO: 1074 - protein, 124 aa, Lama pacos
QVQLVESGGGSVQAGGSLRLSCAASGSISSITYLGWFRQAPGKEREGVAALNTFNGTTYYADSVKGRFTVSLDNAKNTVYLQMNSLKPEDTALYYCAAATWGYSWPLIAEYNWYWGQGTQVTVS

SEQ ID NO: 1075 - protein, 114 aa, Lama pacos
QVQLVESGGGLVQAGGSLRLSCAASGFPVLFTYMHWYRQAPGKEREWVAAIWSSGNSTWYADSVKGRFTISRDNAKNTVYLQMNSLKPEDTAVYYCFVKVGNWYAGQGTQVTVS

SEQ ID NO: 1076 - protein, 124 aa, Lama pacos
QVQLVESGGGSVQAGGSLRLSCAASGSISSITYLGWFRQAPGKEREGVAALKTQAGFTYYADSVKGRFTVSLDNAKNTVYLQMNSLKPEDTALYYCAAANWGYSWPLYEADDWYWGQGTQVTVS

SEQ ID NO: 1077 - protein, 114 aa, Lama pacos
QVQLVESGGGLVQAGGSLRLSCAASGFPVNAGNMHWYRQAPGKEREWVAAIQSYGRTTYYADSVKGRFTISRDNAKNTVYLQMNSLKPEDTAVYYCRVFVGMHYFGQGTQVTVS

SEQ ID NO: 1078 - protein, 114 aa, Lama pacos
QVQLVESGGGLVQAGGSLRLSCAASGFPVSSSTMTWYRQAPGKEREWVAAINSYGWETHYADSVKGRFTISRDNAKNTVYLQMNSLKPEDTAVYYCYVYVGGSYIGQGTQVTVS

SEQ ID NO: 1079 - protein, 125 aa, Lama pacos
QVQLVESGGGSVQAGGSLRLSCAASGSISSITYLGWFRQAPGKEREGVAALVTSDGRTYYADSVKGRFTVSLDNAKNTVYLQMNSLKPEDTALYYCAAANWGYSWPLYQTEYWYWGQGTQVTVSS

SEQ ID NO: 1080 - protein, 115 aa, Lama pacos
QVQLVESGGGLVQAGGSLRLSCAASGFPVQLYWMEWYRQAPGKEREWVAAITSDGDYTEYADSVKGRFTISRDNAKNTVYLQMNSLKPEDTAVYYCYVKVGEWYYGQGTQVTVSS

SEQ ID NO: 1081 - protein, 115 aa, Lama pacos
QVQLVESGGGLVQAGGSLRLSCAASGFPVENYYMRWYRQAPGKEREWVAAIESSGAETRYADSVKGRFTISRDNAKNTVYLQMNSLKPEDTAVYYCYVVVGWGYAGQGTQVTVSS

SEQ ID NO: 1082 - protein, 115 aa, Lama pacos
QVQLVESGGGLVQAGGSLRLSCAASGFPVYEHYMRWYRQAPGKEREWVAAIQSHGNHTAYADSVKGRFTISRDNAKNTVYLQMNSLKPEDTAVYYCFVVVGNGYTGQGTQVTVSS

SEQ ID NO: 1083 - protein, 115 aa, Lama pacos
QVQLVESGGGLVRAGGSLRLSCAASGFPVASQEMTWYRQAPGKEREWVAAISSSGRQTEYADSVKGRFTISRDNAKNTVYLQMNSLKPEDTAVYYCYVYVGGSYIGQGTQVTVSS

SEQ ID NO: 1084 - protein, 115 aa, Lama pacos
QVQLVESGGGLVQAGGSLRLSCAASGFPVKASEMEWYRQAPGKEREWVAAIASIGYNTYYADSVKGRFTISRDNAKNTVYLQMNSLKPEDTAVYYCLVYVGATYIGQGTQVTVSS

SEQ ID NO: 1085 - protein, 115 aa, Lama pacos
QVQLVESGGGLVQAGGSLRLSCAASGFPVSNEEMTWYRQAPGKEREWVAAIASNGNQTEYADSVKGRFTISRDNAKNTVYLQMNSLKPEDTAVYYCYVYVGASYIGQGTQVTVSS

SEQ ID NO: 1086 - protein, 115 aa, Lama pacos
QVQLVESGGGLVQAGGSLRLSCAASGFPVKESEMTWYRQARGKEREWVAAINSHGMTTHYADSVKGRFTISRDNAKNTVYLQMNSLKPEDTAVYYCYVYVGGSYIGQGTQVTVSS

SEQ ID NO: 1087 - protein, 116 aa, Lama pacos
QVQLVESGGGLVQAGGSLRLSCAASGFPVNHYEMEWYRQAPGREREWVAAIMDSTGYETAYADSVKGRFTISRDNAKNTVYLQMNSLKPEDTAVYYCYVYVGASYIGQGTQVTVSS

SEQ ID NO: 1088 - protein, 115 aa, Lama pacos
QVQLVESGGGLVQAGGSLRLSCAASGFPVESENMHWYRQAPGKEREWVAAIYSTGGWTLYADSVKGRFTISRDNAKNTVYLQMNSLKPEDTAVYYCAVQVGYWYEGQGTQVTVSS

SEQ ID NO: 1089 - protein, 115 aa, Lama pacos
QVQLVESGGGLVQAGGSLRLSCAASGFPVESTEMTWYRQAPGKEREWVAAIESEGHGTEYADSVKGRFTISRDNAKNTVYLQMNSLKPEDTAVYYCYVYVGAGYIGQGTQVTVSS

SEQ ID NO: 1090 - protein, 115 aa, Lama pacos
QVQLVESGGGLVQAGGSLRLSCAASGFPVKASEMVWYRQAPGKEREWVAAILSQGHATEYADSVKGRFTISRDNAKNTVYLQMNSLKPEDTAVYYCYVWVGRSYIGQGTQVTVSS

SEQ ID NO: 1091 - protein, 115 aa, Lama pacos
QVQLVESGGGLVQAGGSLRLSCAASGFPVYSAEMEWYRQAPGKEREWVAAISSYGTNTYYADSVKGRFTISRDNAKNTVYLQMNSLKPEDTAVYYCYVYVGSSYIGQGTQVTVSS

SEQ ID NO: 1092 - protein, 115 aa, Lama pacos
QVQLVESGGGLVQAGGSLRLSCAASGFPVWYKEMEWYRQAPGKEREWVAAITSAGHHTYYADSVKGRFTISRDNAKNTVYLQMNSLKPEDTAVYYCYVYVGESYIGQGTQVTVSS

SEQ ID NO: 1093 - protein, 115 aa, Lama pacos
QVQLVESGGGLVQAGGSLRLSCAASGFPVAHKSMWWYRQAPGKEREWVAAIESTGDTTRYADSVKGRFTISRDNAKNTVYLQMNSLKPEDTAVYYCVVWVGEVYRGQGTQVTVSS

SEQ ID NO: 1094 - protein, 121 aa, Lama pacos
QVQLVESGGGLVQAGGSLRLSCAASGFPVYNTWMEWYRQAPGKEREWVAAITSYGFHTYYADSVKGRFTISRDNAKNTVYLQMNSLKPEDTAVYYCNVKDEGNTTAYYDYWGQGTQVTVSS

SEQ ID NO: 1095 - protein, 121 aa, Lama pacos
QVQLVESGGGLVQAGGSLRLSCAASGFPVYWAHMTWYRQAPGKEREWVAAIVSSGAYTAYADSVKGRFTISRDNAKNTVYLQMNSLKPEDTAVYYCNVKDFGTQEHYYDYWGQGTQVTVSS

SEQ ID NO: 1096 - protein, 121 aa, Lama pacos
QVQLVESGGGPVQAGGSLRLSCAASGFPVMWSHMHWYRQAPGKEREWVAAIVSYGAYTIYADSVKGRFTISRDNAKNTVYLQMNSLKPEDTAVYYCNVKDFGGYRYYYDYWGQGTQVTVSS

SEQ ID NO: 1097 - protein, 121 aa, Lama pacos
QVQLVESGGGLVQAGGSLRLSCAASGFPVQGTWMEWYRQAPGKEREWVAAITSVGYRTYYADSVKGRFTISRDNAKNTVYLQMNSLKPEDTAVYYCNVKDEGAIAKNYDYWGQGTQVTVSS

SEQ ID NO: 1098 - protein, 121 aa, Lama pacos
QVQLVESGGGLVQAGGSLRLSCAASGFPVYNTWMEWYRQAPGKEREWVAAITSWGFKTYYADSVKGRFTISRDNAKNTVYLQMNSLKPEDTAVYYCNVKDEGYTGYYYDYWGQGTQVTVSS

SEQ ID NO: 1099 - protein, 121 aa, Lama pacos
QVQLVESGGGLVQAGGSLRLSCAASGFPVEWTHMHWYRQAPGKEREWVAAIASSGAYTVYADSVKGRFTISRDNAKNTVYLQMNSLKPEDTAVYYCNVKDWGSQDRYYDYWGQGTQVTVSS

SEQ ID NO: 1100 - protein, 121 aa, Lama pacos
QVQLVESGGGLVQAGGSLRLSCAASGFPVAGTWMEWYRQAPGKEREWVAAITSYGYRTYYADSVKGRFTISRDNAKNTVYLQMNSLKPEDTAVYYCNVKDEGKSSQVYDYWGQGTQVTVSS

SEQ ID NO: 1101 - protein, 121 aa, Lama pacos
QVQLVESGGGLVQAGGSLRLSCAASGFPVNYTIMFWYRKAPGKEREWVAAIKSHGATTLYADSVKGRFTISRDNAKNTVYLQMNSLKPEDTAVYYCNVKDVGNDQKSYDYWGQGTQVTVSS

SEQ ID NO: 1102 - protein, 121 aa, Lama pacos
QVQLVESGGGLVQAGGSLRLSCAASGFPVVWAHMHWYRQAPGKEREWVAAITSEGAHTIYADSVKGRFTISRDNAKNTVYLQMNSLKPEDTAVYYCNVKDWGTYSTYYDYWGQGTQVTVSS

SEQ ID NO: 1103 - protein, 115 aa, Lama pacos
QVQLVESGGGLVQAGGSLRLSCAASGFPVAQQEMTWYRQAPGKEREWVAAISSIGSITHYADSVKGRFTISRDNAKNTVYLQMNSLKPEDTAVYYCYVYVGASYIGQGTQVTVSS

SEQ ID NO: 1104 - protein, 121 aa, Lama pacos
QVQLVESGGGLVQAGGSLRLSCAASGFPVQYEHMHWYRQAPGKEREWVAAIVSEGAYTHYADSVKGRFTISRDNAKNTVYLQMNSLKPEDTAVYYCNVKDWGWLAQYYDYWGQGTQVTVSS

SEQ ID NO: 1105 - protein, 121 aa, Lama pacos
QVQLVESGGGLVQAGGSLRLSCAASGFPVNYNWMEWYRQAPGKEREWVAAITSWGYKTYYADSVKGRFTISRDNAKNTVYLQMNSLKPEDTAVYYCNVKDEGMWQHYYDYWGQGTQVTVSS

SEQ ID NO: 1106 - protein, 121 aa, Lama pacos
QVQLVESGGGLVQAGGSLRLSCAASGFPVWNTWMEWYRQAPGKEREWVAAITSYGFKTYYADSVKGRFTISRDNAKNTVYLQMNSLKPEDTAVYYCNVKDEGNSQSHYDYWGQGTQVTVSS

SEQ ID NO: 1107 - protein, 121 aa, Lama pacos
QVQLVESGGGLVQAGGSLRLSCAASGFPVEMWSMEWYRQAPGKEREWVAAIMSFGYQTWYADSVKGRFTISRDNAKNTVYLQMNSLKPEDTAVYYCNVKDAGNSKALYDYWGQGTQVTVSS

SEQ ID NO: 1108 - protein, 121 aa, Lama pacos
QVQLVESGGGLVQAGGSLRLSCAASGFPVEHDHMHWYRQAPGKEREWVAAIVSQGAYTVYADSVKGRFTISRDNAKNTVYLQMNSLKPEDTAVYYCNVKDWGRAGARYDYWGQGTQVTVSS

SEQ ID NO: 1109 - protein, 121 aa, Lama pacos
QVQLVESGGGLVQAGGSLRLSCAASGFPVDAAWMEWYRQAPGKEREWVAAITSYGYRTYYADSVKGRFTISRDNAKNTVYLQMNSLKPEDTAVYYCNVKDMDRWRTTYDYWGQGTQVTVSS

SEQ ID NO: 1110 - protein, 115 aa, Lama pacos
QVQLVESGGGLVQAGGSLRLSCAASGFPVNHTRMYWYRQAPGKEREWVAAIQSHGQNTFYADSVKGRFTISRDNAKNTVYLQMNSLKPEDTAVYYCYVWVGNQYWGQGTQVTVSS

SEQ ID NO: 1111 - protein, 121 aa, Lama pacos
QVQLVESGGGLVQAGGSLRLSCAASGFPVVAWQMTWYRQAPGKEREWVAAIRSFGVSTHYADSVKGRFTISRDNAKNTVYLQMNSLKPEDTAVYYCNVKDWGYEYEGYDYWGQGTQVTVSS

SEQ ID NO: 1112 - protein, 121 aa, Lama pacos
QVQLVESGGGLVQAGGSLRLSCAASGFPVQHEWMEWYRQAPGKEREWVAAITSYGYRTYYADSVKGRFTISRDNAKNTVYLQMNSLKPEDTAVYYCNVKDTGTYQAWYDYWGQGTQVTVSS

SEQ ID NO: 1113 - protein, 121 aa, Lama pacos
QVQLVESGGGLVQAGGSLRLSCAASGFPVEQEHMYWYRQASGKEREWVAAIVSEGAYTAYADSVKGRFTISRDNAKNTVYLQMNSLKPEDTAVYYCNVKDWGGYQWYYDYWGQGTQVTVSS

SEQ ID NO: 1114 - protein, 121 aa, Lama pacos
QVQLVESGGGLVQAGGSLRLSCAASGFPVNAEIMFWYRQAPGKEREWVAAIKSAGTTTLYADSVKGRFTISRDNAKNTVYLQMNSLKPEDTAVYYCNVKDYGAQAHYYDYWGQGTQVTVSS

SEQ ID NO: 1115 - protein, 121 aa, Lama pacos
QVQLVESGGGLVQAGGSLRLSCAASGFPVMWAHMAWYRQAPGKEREWVAAIVSAGAYTHYADSVKGRFTISRDNAKNTVYLQMNSLKPEDTAVYYCNVKDWGTYNSYYDYWGQGTQVTVSS

SEQ ID NO: 1116 - protein, 115 aa, Lama pacos
QVQLVESGGGLVQAGGSLRLSCAASGFPVNAEEMEWYRQAPGKEREWVAAISSSGDWTYYADSVKGRFTISRDNAKNTVYLQMNSLKPEDTAVYYCLVYVGSTYIGQGTQVTVSS

SEQ ID NO: 1117 - protein, 125 aa, Lama pacos
QVQLVESGGGSVQAGGSLRLSCAASGNIQHIKYLGWFRQAPGREREGVAALMTRYGQTYYADSVKGRFTVSLDNAKNTVYLQMNSLKPEDTALYYCAAAHYGDNFPLAYQAYLYWGQGTQVTVSS

SEQ ID NO: 1118 - protein, 125 aa, Lama pacos
QVQLVESGGGSVQAGGSLRLSCAASGYINQIYYLGWFRQAPGKEREGVAALNTYQGQTYYADSVKGRFTVSLDNAKNTVYLQMNSLKPEDTALYYCAAARWGRDEPLYHYYYSYWGQGTQVTVSS

SEQ ID NO: 1119 - protein, 121 aa, Lama pacos
QVQLVESGGGLVQAGGSLRLSCAASSFPVDTYHMAWYRQAPGKEREWVAAIVSWGWRTYYADSVKGRFTISRDNAKNTVYLQMNSLKPEDTAVYYCNVKDIGAQEVHYDYWGQGTQVTVSS

SEQ ID NO: 1120 - protein, 125 aa, Lama pacos
QVQLVESGGGSVQAGGSLRLSCAASGYIKSIKYLGWFRQAPGKEREGVAALMTRYGETYYADSVKGRFTVSLDNAKNTVYLQMNSLKPEDTALYYCAAANYGNNWPLTGVNYWYWGQGTQVTVSS

SEQ ID NO: 1121 - protein, 115 aa, Lama pacos
QVQLVESGGGLVQAGGSLRLSCAASGFPVKSYEMEWYRQAPGKEREWVAAISSYGEYTEYADSVKGRFTISRDNAKNTVYLQMNSLKPEDTAVYYCYVWVGDSYLGQGTQVTVSS

SEQ ID NO: 1122 - protein, 125 aa, Lama pacos
QVQLVESGGGSVQAGGSLRLSCAASGGITHIVYLGWFRQAPGKEREGVAALMTRWGTTYYADSVKGRFTVSLDNAKNTVYLQMNSLKPEDTALYYCAAAKYGQNFPLSYHAYRYWGQGTQVTVSS

SEQ ID NO: 1123 - protein, 125 aa, Lama pacos
QVQLVESGGGSVQAGGSLRLSCAASGYIKHIEYLGWFRQAPGKEREGVAALKTSSGSTYYADSVKGRFTVSLDNAKNTVYLQMNSLKPEDTALYYCAAARYGRSDPLHYHEYSYWGQGTQVTVSS

SEQ ID NO: 1124 - protein, 125 aa, Lama pacos
QVQLVESGGGSVQAGGSLRLSCAASGSISSITYLGWFRQAPGKEREGVAALVTSRGKTYYADSVKGRFTVSLDNAKNTVYLQMNSLKPEDTALYYCAAASWGYTWPLYTYDYWYWGQGTQVTVSS

SEQ ID NO: 1125 - protein, 121 aa, Lama pacos
QVQLVESGGGLVQAGGSLRLSCAASGFPVWAHHMLWYRQAPGKEREWVAAIASWGANTAYADSVKGRFTISRDNAKNTVYLQMNSLKPEDTAVYYCNVKDSGQYRENYDYWGQGTQVTVSS

SEQ ID NO: 1126 - protein, 115 aa, Lama pacos
QVQLVESGGGLVQAGGSLRLSCAASGFPVGQQHMYWYRQAPGKEREWVAAIYSYGHITKYADSVKGRFTISRDNAKNTVYLQMNSLKPEDTAVYYCWVYVGDYYEGQGTQVTVSS

SEQ ID NO: 1127 - protein, 125 aa, Lama pacos
QVQLVESGGGSVQAGGSLRLSCAASGAINQIYYLGWFRQAPGKEREGVAALSTKYGETYYADSVKGRFTVSLDNAKNTVYLQMNSLKPEDTALYYCAAARWGRQYPLTFVYYSYWGQGTQVTVSS

SEQ ID NO: 1128 - protein, 125 aa, Lama pacos
QVQLVESGGGSVQAGGSLRLSCAASGHIAQIEYLGWFRQAPGKEREGVAALSTNQGYTYYADSVKGRFTVSLDNAKNTVYLQMNSLKPEDTALYYCAAARWGRTYPLSYMAYTYWGQGTQVTVSS

SEQ ID NO: 1129 - protein, 125 aa, Lama pacos
QVQLVESGGGSVQAGGSLRLSCAASGYITMIEYLGWFRQAPGKEREGVAALNTHTGGTYYADSVKGRFTVSLDNAKNTVYLQMNSLKPEDTALYYCAAARWGRYEPLHYAYYSYWGQGTQVTVSS

SEQ ID NO: 1130 - protein, 125 aa, Lama pacos
QVQLVESGGGSVQAGGSLRLSCAASGNIYNIKYLGWFRQAPGKEREGVAALMTRYGETYYADSVKGRFTVSLDNAKNTVYLQMNSLKPEDTALYYCAAASYGANWPLVSAAYTYWGQGTQVTVSS

SEQ ID NO: 1131 - protein, 126 aa, Lama pacos
QVQLVESGGGSVQAGGSLRLSCAASGAISTIEYLGWFRQAPGREREGVAALYTERGYTYYADSVKGRFTVSLDNAKNTVYLQMNSLKPEDTALYYCAAARYGHAQAPLHYFWYGYWGQGTQVTVSS

SEQ ID NO: 1132 - protein, 115 aa, Lama pacos
QVQLVESGGGLVQAGGSLRLSCAASGFPVAAYEMEWYRQAPGKEREWVAAINSMGDQTYYADSVKGRFTISRDNAKNTVYLQMNSLKPEDTAVYYCYVYVGFSYIGQGTQVTVSS

SEQ ID NO: 1133 - protein, 115 aa, Lama pacos
QVQLVESGGGLVQAGGSLRLSCAASGFPVDYMEMEWFRQAPGKEREWVAAITSNGRETYYADSVKGRFTVSRDNAKNTVYLQMNSLKPEDTAVYYCYVYVGSSYIGQGTQVTVSS

SEQ ID NO: 1134 - protein, 115 aa, Lama pacos
QVQLVESGGGLVQAGGSLRLSCAASGFPVWFQEMEWYRQAPGKEREWVAAISSQGTHTYYADSVKGRFTISRDNAKNTVYLQMNSLKPEDTAVYYCYVYVGASYLGQGTQVTVSS

SEQ ID NO: 1135 - protein, 115 aa, Lama pacos
QVQLVESGGGLVQAGGSLRLSCAASGFPVWQGEMAWYRQAPGKEREWVAAISSMGYKTYYADSVKGRFTISRDNAKNTVYLQMNSLKPEDTAVYYCAVMVGFWYAGQGTQVTVSS

SEQ ID NO: 1136 - protein, 117 aa, Lama pacos
QVQLVESGGGLVQAGGSLRLSCAAGGFPVKDHEMEWYRQAPGKEREWVAAITSSGWGTNTYYADSVKGRFTISRDNAKNTVYLQMNSLKPEDTAVYYCYVYVGSSYIGQGTQVTVSS

SEQ ID NO: 1137 - protein, 115 aa, Lama pacos
QVQLVESGGGLVQAGGSLRLSCAASGFPVNQEEMEWYRQAPGKEREWVAAIKSWGTLTAYADSVKGRFTISRDNAKNTVYLQMNSLKPEDTAVYYCAVHVGQTYIGQGTQVTVSS

SEQ ID NO: 1138 - protein, 115 aa, Lama pacos
QVQLVESGGGLVQAGGSLRLSCAASGFPVYSWNMWWYRQAPGKEREWVAAIESHGDSTRYADSVKGRFTISRDNAKNTVYLQMNSLKPEDTAVYYCYVWVGHTYYGQGTQVTVSS

SEQ ID NO: 1139 - protein, 115 aa, Lama pacos
QVQLVESGGGLVQAGGSLRLRCAASGFPVETTEMEWYRQAPGKEREWVAAISSYGSETYYADSVKGRFTISRDNAKNTVYLQMNSLKPEDTAVYYCYVYVGTSYLGQGTQVTVSS

SEQ ID NO: 1140 - protein, 114 aa, Lama pacos
QVQLVESGGGLVQAGGSLRLSCAASGFPVWSNEMEWYRQAPGKEREWVAAITSYGTTEYADSVKGRFTISRDNAKNTVYLQMNSLKPEDTAVYYCYVYVGYSYIGQGTQVTVSS

SEQ ID NO: 1141 - protein, 118 aa, Lama pacos
QVQLVETGGGLVQPGGSLRLSCAASGFTFSSVYMNWVRQAPGKGPEWVSRISPNSGNIGYTDSVKGRFTISRDNAKNTLYLQMNNLKPEDTALYYCAIGLNLSSSSVRGQGTQVTVSS

SEQ ID NO: 1142 - protein, 125 aa, Lama pacos
QVQLQESGGGLVQAGGSLRLSCAASGRTFSEYAMGWFRQAPGKEREFVATISWSGGSTYYTDSVKGRFTISRDNAKNTVYLQMNSLKPDDTAVYYCAAAGLGTVVSEWDYDYDYWGQGTQVTVSS

SEQ ID NO: 1143 - protein, 119 aa, Lama pacos
QVQLVESGGGLVQPGESLRLSCAASGNIFGIAAVHWFRKAPGKEREFTAGFGSDGSTNYANSVKGRFTISRDNAKNTTYLQMNSLKPEDTAVYYCHALIKNELGFLDYWGPGTQVTVSS

SEQ ID NO: 1144 - protein, 119 aa, Lama pacos [sequence omitted]

SEQ ID NO: 1145 - protein, 112 aa, Homo sapiens
EIVMTQSHTLLPVTPGEPASITCRSSQSLLHSNGYNYLDWYLQKPGQSPQLLIYLGSNRASGVPDRFSGSGSGTDFTLKISRVEAEDVGVYYCMQALQTPQTFGQGTKVDIK

SEQ ID NO: 1146 - protein, 108 aa, Homo sapiens
DIVMTQSPATLSVSPEERATLSCRASQSVSSNLAWYQQKPGQAPRLLIYGASTRATGIPARFSGSGSGTEFTLTISSLQSEDFAVYYCQQYNKWPPWTFGQGTKVDIK

SEQ ID NO: 1147 - protein, 113 aa, Homo sapiens
EIVLTQSPDSLAVSLGERATINCRSSQSVLYSSNNKNYLAWYQQKPGQPPKVLIYWASTRESGVPDRFSGSGSGTDFTLTISSLQAEDVAVYYCQQYYSSPYAFGPGTKVDIK

SEQ ID NO: 1148 - protein, 113 aa, Homo sapiens
EIVLTQSPDSLAVSLGERATINCKSSQSVLYSSNNKNYLAWYQQKPGQPPKLLIYWASTRESGVPDRFSGSGSGTDFTLTISSLQAEDVAVYYCHQYYNTPRTFGQGTKVEIK

SEQ ID NO: 1149 - protein, 107 aa, Homo sapiens
DIVMTQSPATLSLSPGERATLSCRASQSVSSYLAWYQQKPGQAPRLLIYDASNRATGIPARFSGSGSGADFTLTISSLEPEDFAVYYCRQRSNWPPTFGGGTKVDIK

SEQ ID NO: 1150 - protein, 107 aa, Homo sapiens
DIVMTQSPSSLSASVGDRVTITCRASQSISSYLNWYQQEPGKAPKLLIYAASSLQSGVPSRFSGSGSGTDFTLTISSLQPEDFATYYCQQSYSTPPTFGQGTKVDIK

SEQ ID NO: 1151 - protein, 107 aa, Homo sapiens
DIQMTHSLILLSASVGDRVTITCRASQSISSYLNWYQQKPGKAPKLLIYAASSLQSGVPSRFSGSGSGADFTLTISSLQPEDFATYYCQQTYRPPWTFGQGTKVDIK

SEQ ID NO: 1152 - protein, 112 aa, Homo sapiens
EIVVTQSLLSLPVTPGEPASISCRSSQSLLHSNGYNYLDWYLQKPGQSPQVLIYLGSNRASGVPDRFSGSGSGTDFTLKISRVEAEDVGVYYCMQTLQTPYTFGQGTKVEIK

SEQ ID NO: 1153 - protein, 107 aa, Homo sapiens
DIQMTQSPSSLSASVGDRVTITCQASQDISNYLNWYQQKPGKAPKLLIYDASNLETGVPSRFSGSGSGTDFTFTISSLQPEDIATYYCQQYDNLPLTFGGGTKVEIK

SEQ ID NO: 1154 - protein, 112 aa, Homo sapiens
EIVMTQSPLSSPVTLGQPASISCRSSQSLVHSDGNTYLSWLQQRPGQPPRLLIYKISNRFSGVPDRFSGSGAGTDFTLKISRVEAEDVGVYYCMQATQFPYTFGQGTKVDIK

SEQ ID NO: 1155 - protein, 113 aa, Homo sapiens
DIVMTHSLRLLAVSLGERATINCKSSQSVLYSSNNKNYLAWYQQKPGQPPKLLIYWASTRESGVPDRFSGSGSGTDFTLTISSLQAEDVAVYYCQQYYSTYGSFGGGTKVDIK

SEQ ID NO: 1156 - protein, 110 aa, Homo sapiens
QAVVTQPPSVSAAPGQKVTISCSGSSSNIGNNYVSWYQQLPGTAPKLLIYDNNKRPSGIPDRFSGSKSGTSATLGITGLQTGDEADYYCGTWDSSLSVVVFGGGTKLTVL

SEQ ID NO: 1157 - protein, 110 aa, Homo sapiens
QAVVTQPPSASGTPGQRVTISCSGSSSNIGSNTVNWYQQLPGTAPKLLIYSNNQRPSGVPDRFSGSKSGTSASLAISGLQSEDEADYYCAAWDDSLNGVVFGGGTKLTVL

SEQ ID NO: 1158 - protein, 107 aa, Homo sapiens
DIQLTQSPSSLSASVRNRVTITCRASQGIKNDLCWYQQKPGKAPKRLIYAASSLQSGVPSRFSGSGSGTEFTLTISSLQPEDFATYYCLQHNNYPLTFGGGTNEEIK

SEQ ID NO: 1159 - protein, 109 aa, Mus musculus
QAVVTQESALTTSPGETVTLTCRSSTGAVTTSNYANWVQEKPDHLFTGLIGGTNNRAPGVPARFSGSLIGDKAALTITGAQTEDEAIYFCALWYSNHWVFGGGTKLTVL

SEQ ID NO: 1160 - protein, 107 aa, Mus musculus
DIQMTQSPSSLSASLGDRVTISCRASQDISNYLNWYQQKPDGTVKLLIFYTSRLHSGVPSRFSGSGSGTDYSLTISNLEQEDIATYFCQQGNTLPYTFGGGTKLEIK

SEQ ID NO: 1161 - protein, 106 aa, Mus musculus
DIKMTQSPSSMYASLGERVTITCKASQDINSFLSWFQQKPGKSPKTLIYRANRLVDGVPSRFSGSGSGQDYSLTISSLDYEDMGIYYCLQYDEFRTFGGGTKLEIK

SEQ ID NO: 1162 - protein, 109 aa, Mus musculus
QAVVTQESALTTSPGETVTLTCRSSTGAVTTSNYANWVQEKPDHLITGLIGGTNNRVPGVPARFSGSLIGDKAALTITGAQTEDEAIYFCALWYSNQFIFGSGTKVTVL

SEQ ID NO: 1163 - protein, 109 aa, Mus musculus; identical to SEQ ID NO: 1159

SEQ ID NO: 1164 - protein, 111 aa, Mus musculus
DIVLTQSPASLAVSLGQRATISCRASESVDSYGTSFMHWYQQKPGQPPKLLIYLASNLESGVPARFSGSGSRTDFTLTIDPVEADDAATYYCQQNNEDPLTFGAGTKLELK

SEQ ID NO: 1165 - protein, 112 aa, Mus musculus
DVVMTQTPLSLPVSLGDQASISCRSSQSIVHSNGNTYLEWYLQKPGQSPKLLIYKVSNRFSGVPDRFSGSGSGTDFTLKISRVEAEDLGVYYCFQGSHVPPTFGGGTKLEIK

SEQ ID NO: 1166 - protein, 111 aa, Mus musculus
DIVLTQSPASLAVSLGQRATISCRASEGVDSYGSSFMHWYQQKPGQPPKLLIYLASNLESGVPARFSGSGSGTDFTLTIDPVEADDAATYYCQQNNEDPLTFGAGTKLELK

SEQ ID NO: 1167 - protein, 106 aa, Mus musculus
DIKMTQSPSSMYASLGERVTITCKASQDINSFLSWFQQKPGKSPKTLIYRANRLVDGVPSRFSGSGSGQDYSLTISSLEYEDMGIYYCLQYDEFRTFGGGTKLEIK

SEQ ID NO: 1168 - protein, 109 aa, Mus musculus
QAVVTQESALTTSPGETVTLTCRSSTGAVTTSNYANWVQEKPDHLITGLIGGTNNRVPGVPARFSGSLIGDKAALTITGAQTEDKAIYFCALWYSNQFIFGSGTKVTVL

SEQ ID NO: 1169 - protein, 111 aa, Mus musculus
DIVLTQSPASLAVSLGQRATISCRASEGVDSYGSSFMHWYQQKPGQAPKLLIYLASNLESGVPARFSGSGSRTDFTLTIDPVEADDAAIYYCQQNNEDPLTFGAGTKLEIK

SEQ ID NO: 1170 - protein, 111 aa, Mus musculus
DIVLTQSPASLAVSLGQRATISCRASESVEYYGTSLMQWFQQKPGQPPKLLIFAASNVESGVPARFGGSGSGTDFSLNIHPVEEDDIAMYFCQQSRKVPWTFGGGTKLEIK

SEQ ID NO: 1171 - protein, 106 aa, Mus musculus
QIVLTQSPAIMSASPGEKVTMTCSASSSVSYMHWYQQKSGTSPKRWIYDTSKLASGVPARFSGSGSGTSYSLTISSMEAEDAATYYCQQWSSNPPTFGSGTKLEIK

SEQ ID NO: 1172 - protein, 111 aa, Mus musculus
DIVLTQSPASLAVSLGQRATISCRASESVEYYGTSLMQWFQQKPGQPPKLLIFAASNVESGVPARFGGSGSGTDFSLNIHPVEEDDIATYFCQQSRKVPWTFGGGTKLEIK

SEQ ID NO: 1173 - protein, 109 aa, Mus musculus; identical to SEQ ID NO: 1159

SEQ ID NO: 1174 - protein, 110 aa, Mus musculus
QAVVTQPPSASGTPGQRVTISCSGSSSNIGSNYVYWYQQLPGTAPKLLIYNNNQRPSGVPDRFSGSKSGTSASLAISGLRSEDEADYYCAAWDDSLIYVLFGGGTKLTVL

SEQ ID NO: 1175 - protein, 109 aa, Mus musculus
QAVVTQESALTTSPGETVTLTCRSSTGAVTTSNYANWVQEKPDHLFTGLIGGTNNRAPGVPARFSGSLIGDKAALTITGAQTEDEAIYFCALWYNNHWVFGGGTKLTVL

SEQ ID NO: 1176 - protein, 106 aa, Mus musculus
QIVLTQSPAIMSASPGEKVTMTCSASSSVSYMYWYQQKPGSSPRLLIYDTSNLASGVPIRFSGSGSGTSYSLTISRMEAEDAATYYCQQWSSYPLTFGAGTKLELK

SEQ ID NO: 1177 - protein, 112 aa, Mus musculus
DVVMTQTPLSLPVSLGDQASISCRSSQSIVYSNGNTYLEWYLQKPGQSPKLLIYKVSNRFSGVPDRFSGSGSGTDFTLKISGVEAEDLGVYYCFQGSHVPYTFGGGTKLEIK

SEQ ID NO: 1178 - protein, 111 aa, Mus musculus
DIVLTQSQASLAVSLGQRATISCRASESVEYYGTSLMQWYQQKPGQPPKLLIYAASNVESGVPARFSGSGSGTDFSLNIHPVEEDDIAMYFCQQSRKVPWTFGGGTKLEIK

SEQ ID NO: 1179 - protein, 106 aa, Mus musculus; identical to SEQ ID NO: 1176

SEQ ID NO: 1180 - protein, 111 aa, Mus musculus; identical to SEQ ID NO: 1178

SEQ ID NO: 1181 - protein, 111 aa, Mus musculus
DIVLTQSPASLAVSLGQRATISCRASESVDNYGISFMNWFQQKPGQPPKLLIYAASNQGSGVPARFSGSGSGTDFSLNIHPMEEDDTAMYFFQQSKEVPWTFGGGTKLEIK

SEQ ID NO: 1182 - protein, 111 aa, Mus musculus
DIVLTQSPASLTVSLGQRATISCKASQSVDYGGDRYMNWYQQKPGQPPKLLIFAASNLESGIPARFSGSGSGTDFTLNIHPVEEEDAATYYCQQSNEDPYTFGGGTKLEIK

SEQ ID NO: 1183 - protein, 111 aa, Mus musculus
DIVLTQSPASLAVSLGQRATMSCRASESVDSYGNGFMHWYQQKPGQPPKLLIYLASNLESGVPARFSGSGSRTDFSLTIDPVEADDAAIYYCQQNNEDPLTFGAGTKLELK

SEQ ID NO: 1184 - protein, 107 aa, Mus musculus
DIVLTQSPAILSVSPGERVSFSCRASQNIGTIIHWYQQRTNGSPRLLIKYASESVSGIPSRFSGSGSGTDFTLSINSVESEDIADYYCQQSSSWPLTFGAGTKLELK

SEQ ID NO: 1185 - protein, 107 aa, Mus musculus; identical to SEQ ID NO: 1184

SEQ ID NO: 1186 - protein, 111 aa, Homo sapiens
QSALTQPHSVSESPGKTVTISCTGSSGSIASNYVQWYQQRPGSAPTTVIYEDNQRPSGVPDRFSGSIDSSSNSASLTISGLKTEDEADYYCQSYDSSNHWVFGGGTKLTVL

SEQ ID NO: 1187 - protein, 107 aa, Homo sapiens
AIRMTQSPSSLSASVGDRVTITCRASQSITGYLNWYQQKPGKAPKLLISAASSLQSGVPSRFSGSGSGTDFTLTISSLQPEDFATYYCQQSYSTPRTFGPGTKVEIK

SEQ ID NO: 1188 - protein, 113 aa, Homo sapiens
AIRMTQSPDSLAVSLGERATINCKSSQSVLYSPNNKNYLAWYQQKPGQPPKLLIYWASTRESGVPDRFSGSGSGTDFTLTISSLQAEDVAVYYCQQYYSTPFTFGQGTRLEIK

SEQ ID NO: 1189 - protein, 109 aa, Homo sapiens
EIVMTQSPGTLSLSPGERATLSCRASQSVSSSYLAWYQQKPGQAPRLLIYGASSRATGIPDRFSGSGSGTDFTLTISRLEPEDFAVYYCQQYGSSRSWTFGQGTKVEIK

SEQ ID NO: 1190 - protein, 109 aa, Homo sapiens
AIRMTQSPSSLSASVGDRVTITCRASQSISSYLNWYQQKPGKAPKLLIYAASSLQSGVPSRFSGSGSGTDFTLTISSLQPEDFATYYCQQSYSTFTLYTFGQGTKVDIK

SEQ ID NO: 1191 - protein, 107 aa, Homo sapiens
DIVMTQSPSSLSASVGDRVSITCRASQNISNYLNWYQQKPGEAPKLLISAASSLQSGVPSRFGGSGSGTGFTLTINSLQPEDFATYYCQQSHSFPFTFGPGTKVDIK

SEQ ID NO: 1192 - protein, 106 aa, Homo sapiens
AIRMTQSPSFLSVSVGDRVTITCRASQGISSYLAWYQQKPGKAPKLLIYAASTLQSGVPSRFSGSGSGTEFTLTISSLQPEDFATYYCQQLNSYVTFGGGTKVEIK

SEQ ID NO: 1193 - protein, 110 aa, Homo sapiens
QSVLTQLPSASGTPGQTVTISCSGNVFKEKSNYVYWYQQLPGTAPKLLIYRNNHRPSGVPDRFSGSKSGTSPSLAISGLRSEDEADYYCAARDDSLSGWVFSGRTKLTVL

SEQ ID NO: 1194 - protein, 106 aa, Homo sapiens
EIVMTQSPATLSLSPGERATLSCRASQSVSTSLAWYQQKPGQAPRLLIYDASNRATGVPARFSGSGSGTDFTLTISSLEPDDFAVYYCQQRTNWPLFGPGTKVEIK

SEQ ID NO: 1195 - protein, 106 aa, Homo sapiens
DIQMTQSPSSLSVSAGERATLSCRASQSVSSYLIWCHQKPGKAPKLLIYDASTLQTGVPSRFIGGGSGTNFTLTIISLQPEDFAAYYCQQNYSTWTIGQGSRVEMK

SEQ ID NO: 1196 - protein, 110 aa, Homo sapiens
QSVLTQPASVSGSPGQSITISCTGTSSDVGMYNLVSWYQQHPGQAPKLMIYEGSKRPSGVSNRFSGSKSGNTASLTISGLQAEDEAYYYCCSYAVSSTWVFGGGTKLTVL

SEQ ID NO: 1197 - protein, 109 aa, Homo sapiens
DIVMTQSPATLSLSPGERATLSCRASQSVSNFLAWYQQKPGQAPRLLIYDASNRATGIPARFSGSGSGTDFTLTISSLEPEDFAVYYCQQRSNWPPAFTFGPGTKVEIK

SEQ ID NO: 1198 - protein, 109 aa, Homo sapiens
EIVLTQSPATLSLSPGERATLSCRASQSVSSYLAWYQQKPGQAPRLLIYDASNRATGIPARFSGSGSGTDFTLTISSLEPEDFAVYYCQQRSNWPPKITFGQGTRLEIK

SEQ ID NO: 1199 - protein, 113 aa, Homo sapiens
DIQMTQSPDSLAVSLGERATIKCKSSQSVLHSSNNKNYLAWYQQKAGQPPSLLLYWASTRESGVPDRFSGSGSGTDFTLTISSLQAEDVAVYYCQQYYNNQWTFGQGTKVDIK

SEQ ID NO: 1200 - protein, 107 aa, Homo sapiens
AIRMTQSPSSLSASVGDRVTISCRATQNINYFLNWYQQKPGRAPKLLIYAASGLQSGVPSRFSGSGTGRVFTLTINSLQPDDFATYYCQQSFVSPRTFGQGTKVDIK

SEQ ID NO: 1201 - protein, 107 aa, Homo sapiens
DIVMTQSPSSLSAFVGDRVTITCRASRDIGGDLSWFQQKPGKAPERLIYAASSLESGVPSRFSGSGSATEFALTITSLQPEDFATYYCLQHKSYPLTFGGGTKVDIK

SEQ ID NO: 1202 - protein, 112 aa, Homo sapiens
EIVMTQSPLSSPVTLGQPASISCRSSQSLVHSDGNTYLSWLQQRPGQPPRLLIYKISNRFSGVPDRFSGSGAGTDFTLKISRVEAEDVGVYYCTQATQFPYTFGQGTKVDIK

SEQ ID NO: 1203 - protein, 107 aa, Homo sapiens
DIQMTQSPSSLSASVGDRVTITCRASQGIRNDLGWYQQKPGKAPKRLIYAASSLQSGVPSRFSGSGSGTEFTLTISSLQPEDFATYYCLQHNSYPLTFGGGTKVEIK

SEQ ID NO: 1204 - protein, 106 aa, Homo sapiens
SYELTQPPSVSVSPGQTASITCSGDKLGDKYACWYRQKPGQSPVLVIYQDSKRPSGIPERFSGSNSGNTATLTISGTQAMDEADYYCQAWDSSTGVFGGGTKLTVL

SEQ ID NO: 1205 - protein, 107 aa, Homo sapiens
DIVMTQSPATLSASPGERVTLSCRASQNIRNNLAWYQQKPGQAPRLLIHGASTRAAGAPARFSGSGSDTQFTLTVSSLQSEDFAVYYCHQYSKWPVTFGGGTKVDIK

SEQ ID NO: 1206 - protein, 108 aa, Homo sapiens
DIVMTQSPSFLSASVGDRVTITCRASQGISSYLAWYQQKPGKAPKLLIYAASTLQSGVPSRFSGSGSGTEFTLTISSLQPEDFATYYCQQLNSYPPYTFGQGTKLEIK

SEQ ID NO: 1207 - protein, 107 aa, Homo sapiens
DIQMTQSPSTLSASVGDRVTITCRASQSISSWLAWYQQKPGKAPKLLIYKASSLESGVPSRFSGSGSGTEFTLTISSLQPDDFATYYCQQYNSYPYTFGQGTKLEIK

SEQ ID NO: 1208 - protein, 107 aa, Homo sapiens
DIQLTQSPSSLSASVGDRVTITCRASQSISSYLNWYQQKPGKAPKLLIYAASSLQSGVPSRFSGSGSGTDFTLTISSLQPEDFATYYCQQSYSTPRTFGQGTKVEIK

SEQ ID NO: 1209 - protein, 108 aa, Homo sapiens
EIVLTQSPGTLSLSPGERATLSCRASQSVSSTYLAWYQQKPGQAPRLLIYGASSRATGIPDRFSGSGSGTDFTLTISRLEPEDFAVYYCQQYGSSPRTFGQGTKLEIK

SEQ ID NO: 1210 - protein, 107 aa, Homo sapiens
AIRMTQSPSSLSASVGDRVTITCQASQDISNYLNWYQQKPGKAPKLLIYDASNLETGVPSRFSGSGSGTDFTFTISSLQPEDIATYYCQQYDNLPITFGQGTRLEIK

SEQ ID NO: 1211 - protein, 108 aa, Homo sapiens
EIVLTQSPGTLSLSPGERATLSCRASQSVRSSYLAWYQQKPGQAPRLLIYGASSRATGIPDRFSGSGSGTDFTLTISRLEPEDFAVYYCQQYGSSPWTFGQGTKVEIK

SEQ ID NO: 1212 - protein, 110 aa, Homo sapiens
QSVLTQPPSASGTPGQRVTVSCSGSSSNIGSNTVNWYQQLPGTAPKLLIYSNNQRPSGVPDRFSGSKSGTSASLAISGLQSEDEADYFCAAWDDSLNGPVFGGGTKLTVL

SEQ ID NO: 1213 - protein, 106 aa, Homo sapiens
DIQMTQSPSTLSASVGDRVTITCRANQSISSWLAWYQQKPGKAPKLLIYKASSLESGVPSRFSGSGSGTEFTLTISSLQPDDFATYYCQQYNSYWTFGQGTKVEIK

SEQ ID NO: 1214 - protein, 110 aa, Homo sapiens
QSALTQPPSASGSPGQSVTISCTGTSSDVGGYNYVSWYQQHPGKAPKLMIYEVSKRPSGVPDRFSGSKSGNTASLTVSGLQAEDEAEYYCSSDAGSNNVVFGGGTKLTVL

SEQ ID NO: 1215 - protein, 108 aa, Homo sapiens
DIQLTQSPSSLSASVGDRVTITCRASQSISTYLNWYQQKPGKAPKLLIYAASSLQSGVPSRFSGSGSGTDFTLTISSLQPEDFATYYCQQSYSTPPWTFGQGTKVEIK

SEQ ID NO: 1216 - protein, 107 aa, Homo sapiens
EIVLTQSPATLSLSPGERATLSCRASQSVSSYLAWYQQKPGQAPRLLIYDASNRATGIPARFSGSGSGTDFTLTISSLEPEDFAVYYCQQRSNWPLTFGGGTKVEIK

SEQ ID NO: 1217 - protein, 107 aa, Homo sapiens
AIRMTQSPSSLSASVGDRVTITCQASQDISNYLNWYQQKPGKAPKLLIYDASNLETGVPSRFSGSGSGTDFTFTINSLQPEDIATYYCQQYDNLPPTFGGGTKVEIK

SEQ ID NO: 1218 - protein, 103 aa, Homo sapiens
EIVLTQSPATLSLSPGERATLSCRASQSVSSYLAWYQQKPGQAPRLLIYDASNRATGIPARFSGSGSGTDFTLTISSLEPEDFAVYYCQQRITFGQGTRLEIK

SEQ ID NO: 1219 - protein, 108 aa, Homo sapiens
DIQLTQSPSSLSASVGDRVTITCRASQSIRSYLNWYQQKPGKAPKLLIYAASSLQSGVPSRFSGSGSGTDFTLTISSLQPDDFATYYCQQSYSTPPATFGQGTKLEIK

SEQ ID NO: 1220 - protein, 108 aa, Homo sapiens
SYELTQPPSVSVAPGKTARITCGENNIGSKSVHWYQQKPGQAPVLVIYYDSDRPSGIPERFSGSNSGNTATLTINRVEAGDEADYYCQVWDSSSDHVVFGGGTKLTVL

SEQ ID NO: 1221 - protein, 112 aa, Homo sapiens
DIVMTQSPLSLPVTPGEPASISCRSSQSLLHSNGYNYLDWYLQKPGQSPQLLIYLGSNRASGVPDRFSGSGSGTDFTLKISRVEAEDVGVYYCMQALQTPFTFGPGTKVDIK

SEQ ID NO: 1222 - protein, 107 aa, Homo sapiens
DIQMTQSPSTLSASVGDSVTITCRASQSISSWLAWYQQKPGKAPKLLIYKASSLESGVPSRFSGSGSGTEFTLTISSLQPDDFATYYCQQYNNYRYTFGQGTKLEIK

SEQ ID NO: 1223 - protein, 106 aa, Homo sapiens
DIQMTQSPSTLSASVGDRVTITCRASQSISSWLAWYQQKPGKAPKLLIYKASSLESGVPSRFSGSGSGTEFTLTISSLQPDDFATYYCQQYNSYSTFGQGTKVEIK

SEQ ID NO: 1224 - protein, 112 aa, Homo sapiens
DIVMTQSPLSLPVTPGEPASISCRSSQSLLHSNGYNYLDWYLQKPGQSPQLLIYLGSNRASGVPDRFSGSGSGTDFTLKISRVEAEDVGVYYCMQALQTPHTFGGGTKVEIK

SEQ ID NO: 1225 - protein, 106 aa, Homo sapiens; identical to SEQ ID NO: 1223

SEQ ID NO: 1226 - protein, 108 aa, Homo sapiens
DIQMTQSPSSLSASVGDRVTITCRASQSISSYLNWYQQKPGKAPKVLIYAASSLQSGVPSRFSGSGSGTDFTLTISSLQPEDFATYYCQQSYSTPPLTFGGGTKVEIK

SEQ ID NO: 1227 - protein, 108 aa, Homo sapiens
EIVLTQSPGTLSLSPGERATLSCRASQSVSSSYLAWYQQKPGQAPRLLIYGASSRATGIPDRFSGGGSETDFTLTISRLEPEDCAVYYCQQYGSSPRTFGQGTKVEIK

SEQ ID NO: 1228 - protein, 108 aa, Homo sapiens
EIVLTQSPGTLSLSPGERATLSCRASQSVSSSYLAWYQQKPGQAPRLLIYGASSRATGIPDRFSGSGSGTDFTLTISRLEPEDFAVYYCQQYGSSPRTFGQGTKVEIK

SEQ ID NO: 1229 - protein, 108 aa, Homo sapiens
EIVLTQSPGTLSLSPGERATLSCRASQTVTANYLAWYQQKPGQAPRLLIYGASKRATGIPDRFSGSGSGTDFTLSISRLEPEDFAVYYCQQYTTTPRTFGGGTKVEIK

SEQ ID NO: 1230 - protein, 108 aa, Homo sapiens
EIVLTQSPGTVSLSPGERATLSCWASQSVSASYLAWYQQKPGQAPRLLIYGASSRATGIPDRFSGSGSGTDFTLTISRLEPEDFAVYYCQQYGTTPRTFGGGTKVEIK

SEQ ID NO: 1231 - protein, 111 aa, Homo sapiens
QSALTQPPSASGSPGQSVTISCTGTSSDVGGYKYVSWYQQHPGKAPKLMIYEVSKRPSGVPDRFSGSKSGNTASLTVSGLQAEDEADYYCSSYEGSNNFVVFGGGTKLTVL

SEQ ID NO: 1232 - protein, 108 aa, Homo sapiens
SYELTQPPSVSVAPGKTARITCGGNNIGSKSVHWYQQKPGQAPVLVIYFDSDRPSGIPERFSGSNSGNTATLTISRVEAGDEADYYCQVWDSSRDHVVFGGGTKLTVL

SEQ ID NO: 1233 - protein, 111 aa, Homo sapiens
QSVLTQPPSASGTPGQRVTISCSGSSSNIGSNYVYWYQQLPGTAPKLLIYRNNQRPSGVPDRFSGSKSGTSASLAISGLRSEDEADYYCAAWDDSLSGFVVFGGGTKLTVL

SEQ ID NO: 1234 - protein, 110 aa, Homo sapiens
QSALTQPASVSGSPGQSITISCTGTSSDVGGYNYVSWYQQHPGKAPKLMIYDVSNRPSGVSNRFSGSKSGNTASLTISGLQAEDEADYYCNSYTSSSTRVFGTGTKVTVL

SEQ ID NO: 1235 - protein, 111 aa, Homo sapiens
QSALTQPPSASGSPGQSVTISCTGTSSDVGGYNYVSWYQQHPGKAPKLMIYEVTKRPSGVPDRFSGSKSGNTASLTVSGLQAEDEADYYCSSYAGSNNYVVFGGGTKLTVL

SEQ ID NO: 1236 - protein, 107 aa, Homo sapiens
DIQMTQSPSTLSASVGDRVTITCRASQSISYWLAWYQQKPGKAPKLLIYQASSLESGVPSRFSGSESGTEFTLTISSLQPDDFATYYCQQYNSYPYTFGQGTKLEIK

SEQ ID NO: 1237 - protein, 111 aa, Homo sapiens
QSVLTQPPSVSEAPRQRVTISCSGSSSNIGNNAVNWYQQVPGKAPKLLIYYDDLLPSGVSDRFSGSKSGTSASLAISGLQSEDEADYYCAAWDDSLNGAWVFGGGTKLTVL

SEQ ID NO: 1238 - protein, 110 aa, Homo sapiens
QSALTQPASVSGSPGQSITISCTGTSSDVGGYNYVSWYQQHPGKAPKLMIYDVSNRPSGVSNRFSGSKSGNTASLTISGLQAEDEADYYCSSYTSSSTWVFGGGTKLTVL

SEQ ID NO: 1239 - protein, 107 aa, Homo sapiens
DIQMTQSPSTLSASVGDRVTITCRASQSMSSWLAWYQQKPGNAPKLLIYKASSLESGVPSRFSGSGSGTEFTLTISSLQPDDFATYYCQQHNSSPLTFGGGTKVEIK

SEQ ID NO: 1240 - protein, 110 aa, Homo sapiens
QSVLTQPPSVSGAPGQRVTISCTGTSSNIGAGYDVHWYQQLPGRAPKVLISGNNIRPSEVPDRFSGSRSGTSASLAITSLQPEDEAQYYCQSYDSSLYAVFGGGTKLTVL

SEQ ID NO: 1241 - protein, 112 aa, Homo sapiens
DIVMTQSPLSLSVTPGEPASISCRSSQSLLHSNGNNYFDWYLQKPGQSPQLLIYLGSNRASGVPDRFSGSGSGTDFTLKISRVEAEDVGVYYCMQVLQIPYTFGQGTKLEIK

SEQ ID NO: 1242 - protein, 112 aa, Homo sapiens
NFMLTQPHSVSESPGKTVTISCTGSSGSIASNYVQWYQQRPGSAPTTVIYEDNQRPSGVPDRFSGSIDRSSNSASLTISGLKTEDEADYYCQSYDSGNHWVVFGGGTRLTVL

SEQ ID NO: 1243 - protein, 113 aa, Homo sapiens
QSVLTQPPSVSAAPGQKVTISCSGSSSNIGNNLVSWYQQLPGTAPKLLIYENNKRPSGIPDRFSGSKSGTSATLGITGLQTGDEADYYCGAWDSSLSAGGVYVFGTGTKVTVL

SEQ ID NO: 1244 - protein, 111 aa, Homo sapiens
QPVLTQSPSASASLGASVKLTCTLSSGHSSYAIAWHQQQPEKGPRYLMKLNTDGSHSKGDGIPDRFSGSSSGAERYLTISSLQSEDEADYYCQTWGTGILVFGGGTKLTVL

SEQ ID NO: 1245 - protein, 111 aa, Homo sapiens
QSALTQPASVSGSPGQSITISCTGTSSDVGGYKYVSWYQRHPGKAPKLMIYDVSNRPSGVSNRFSGSKSGNTASLTISGLQAEDEADYYCSSYTSSSTSVVFGGGTQLTVL

SEQ ID NO: 1246 - protein, 107 aa, Homo sapiens
AIRMTQSPSSLSASVGDTVTITCQASQDISKYLNWYQQKPGKAPKLLIYDASNLETGVPSRFSGSGSGTDFTFTISSLQPEDIATYYCQQYDNLPQTFGGGTKVEIK

SEQ ID NO: 1247 - protein, 110 aa, Homo sapiens
QSALTQPASVSGSPGQSITISCTGTSSDVGSYNLVSWYQQHPGKAPKLMIYEGSKRPSGVSNRFSGSKSGNTASLTISGLQAEDEADYYCCSYAGSSTLVFGGGTKLTVL

SEQ ID NO: 1248 - protein, 107 aa, Homo sapiens
DIQLTQSPSFLSASVGDRVTITCRASQGISSYLAWYQQKPGKAPKLLIYAASTLQSGVPSRFSGSGSGTEFTLTISSLQPEDFATYYCQQLNSDSYTFGQGTKLEIK

SEQ ID NO: 1249 - protein, 107 aa, Homo sapiens
DIQLTQSPSFLSASVGDRVTITCRASQGISSYLAWYQQKPGKAPKLLIYAASTLQSGVPSRFSGSGSGTEFTLTISSLQPEDFATYYCQQLNSYPPAFGQGTRLEIK

SEQ ID NO: 1250 - protein, 109 aa, Homo sapiens
EIVLTQSPATLSLSPGERATLSCRASQSFSSYLAWYQQKPGQAPRLLIYDASNRATGIPARFSGSGSGTDFTLTISSLEPEDFAVYYCQQRNNWPPEWTFGQGTKVEIK

SEQ ID NO: 1251 - protein, 108 aa, Homo sapiens
EIVLTQSPGTLSLSPGERATLSCRASQSVSSSYLAWYQQKPGQAPRLLIYGASSRATGIPDRFSGSGSGTDFTLTISRLEPEDFAVYYCQQYGSSPWTFGQGTKVEIK

SEQ ID NO: 1252 - protein, 110 aa, Homo sapiens
NFMLTQPHSVSESPGKTVTISCTGSSGSIASNYVQWYQQRPGSAPTTVINEDNQRPSGVPDRFSGSIDSSSNSASLTISGLKTEDEADYYCQSYDSSNLVFGGGTKLTVL

SEQ ID NO: 1253 - protein, 110 aa, Homo sapiens
QSVLTQPPSASGTPGQRVTISCSGSSSNIGSNTVNWYQQLPGTAPKLLIYSNNQRPSGVPDRFSGSKSGTSASLAISGLQSEDEADYYCAAWDDSLNGVVFGGGTKLTVL

SEQ ID NO: 1254 - protein, 109 aa, Homo sapiens
EIVLTQSPGTLSLSPGERATLSCRASQSVNSRQLAWYQQKPGQAPRLLIYGASSRATGIPERFSGSGSGTDFTLTISRLESEDFAVYHCQQYGSSRALTFGGGTKVEIK

SEQ ID NO: 1255 - protein, 110 aa, Homo sapiens
SYELTQPPSVSVAPGKTARITCGGNNIGSKSVHWYQQKPGQAPVLVIYYDSDRPSGIPERFSGSNSGNTATLTISRVEAGDEADYYCQVWDSSSDHPGVVFGGGTKLTVL

SEQ ID NO: 1256 - protein, 107 aa, Homo sapiens
EIVMTQSPATLSVSPGERATLSCRASQSVSSNLAWYQQKPGQAPRLLIYGASTRATGIPARFSGSGSGTEFTLTISSLQSEDFAVYYCQQYNNWPITFGQGTRLEIK

SEQ ID NO: 1257 - protein, 110 aa, Homo sapiens
QSALTQPASVSGSPGQSITISCTGTSSDVGGYNYVSWYQQHPGKAPKLMIYDVSNRPSGVSNRFSGSKSGNTASLTISGLQAEDEADYYCSSYTSSSTLLFGGGTKLTVL

SEQ ID NO: 1258 - protein, 108 aa, Homo sapiens
DIQMTQSPSSLSASVGDRVTITCRASQSISSYLNWYQQKPGKAPKLLIYAASSLQSGVPSRFSGSGSGTDFTLTISSLQPEDFATYYCQQSYSTPPWTFGQGTKVEIK

SEQ ID NO: 1259 - protein, 110 aa, Homo sapiens
SYELTQPPSVSVAPGKTARITCGGNNIGSKSVHWYQQKPGQAPVLVIYYDSDRPSGIPERFSGSNSGNTATLTISRVEAGDEAEYHCQVWDSSSDRPGVVFGGGTKLTVL

SEQ ID NO: 1260 - protein, 107 aa, Homo sapiens
DIQMTQSPSTLSASVGDRVTITCRASQSISNWLAWFQQKPGKAPKLLIYEASSLESGVPSRFSGSGSGTEFTLTISSLQPDDFATYYCQQYNSYPWTFGQGTKVEIK

SEQ ID NO: 1261 - protein, 110 aa, Homo sapiens
NFMLTQPHSVSESPGKTVTISCTGSSGSIASNYVQWYQQRPGSAPTTVIYEDNQRPSGVPDRFSGSIDSSSNSASLTISGLKTEDEADYYCQSYDSSNWVFGGGTKLTVL

SEQ ID NO: 1262 - protein, 107 aa, Homo sapiens; identical to SEQ ID NO: 1153

SEQ ID NO: 1263 - protein, 107 aa, Homo sapiens
DIQLTQSPSFLSASVGDRVTITCRASQGISSYLAWYQQKPGKAPKLLIYAASTLQSGVPSRFSGSGSGTEFTLTISSLQPEDFATYYCQQLNSYSYTFGQGTKLEIK

SEQ ID NO: 1264 - protein, 110 aa, Homo sapiens; identical to SEQ ID NO: 1261

SEQ ID NO: 1265 - protein, 110 aa, Homo sapiens
QSALTQPASVSGSPGQSITISCTGTSNDVGSYTLVSWYQQYPGKAPKLLIFEGTKRSSGISNRFSGSKSGNTASLTISGLQGEDEADYYCCSYAGASTFVFGGGTKLTVL

SEQ ID NO: 1266 - protein, 110 aa, Homo sapiens
QSALTQPASVSGSPGQSITISCTGTSSDVGGYNYVSWYQQHPGKAPKLMIYDVSNRPSGVSNRFSGSKSGNTASLTISGLQAEDEADYYCSSYTSSSTRVFGTGTKVTVL

SEQ ID NO: 1267 - protein, 110 aa, Homo sapiens
QSALTQPASVSGSPGQSITISCTGTSSDVGGYNYVSWYQQHPGKAPKLMIYDVSNRPSGVSNRFSGSKSGNTASLTISGLQAEDEADYYCSSYTSSTTRVFGTGTRVTVL

SEQ ID NO: 1268 - protein, 111 aa, Homo sapiens
QSALTQPASVSGSPGQSITISCTGTSSDIGVYNYISWSQQHPGKAPKVMIYDVTNRPSGVSNRFSGSKSGNTASLTISGLQAEDEADYYCSSYRGSSTPYVFGTGTKVTVL

SEQ ID NO: 1269 - protein, 110 aa, Homo sapiens
QAVVTQEPSLTVSPGGTVTLTCGSSTGAVTSGHYPYWFQQKSGQAPRTLIYETSIKHSWTPARFSGSLLGGKAALTLSGAQPEDEADYYCLLSYSGARPVFGGGTKLTVL

SEQ ID NO: 1270 - protein, 108 aa, Homo sapiens
EIVMTQSPATLSVSPGERATLSCRASQSVSSHLAWYQQKPGQAPRLLIYGASTRATGIPTRFSGSGSGTEFTLTISSLQSEDFAVYYCQQYNNWPPLTFGGGTKVEIK

SEQ ID NO: 1271 - protein, 110 aa, Homo sapiens
QSALTQPASVSGSPGQSITISCTGTSSDVGYYNFVSWYQQHPGKAPKLMIYEVSNRPSGVSNRFSGSKSGNTASLIISGLQAEDEADYYCSSYRSSSTLVFGGGTKLTVL

SEQ ID NO: 1272 - protein, 111 aa, Homo sapiens
NFMLTQPHSVSESPGKTVTISCTGSSGSIASNYVQWYQQRPGSAPTTVIYEDNQRPSGVPDRFSGSIDSSSNSASLTISGLKTEDEADYYCQSYDSSNYWVFGGGTKLTVL

SEQ ID NO: 1273 - protein, 110 aa, Homo sapiens
QSALTQPASVSGSPGQSITISCTGTSSDVGSYNLVSWYQQHPGKAPKLMIYEGSKRPSGVSNRFSGSKSGNTASLTISGLQAEDEADYYCCSYAGSSTWVFGGGTKLTVL

SEQ ID NO: 1274 - protein, 107 aa, Homo sapiens
DIQMTQSPSSLSASVGDRVTITCQASQGISNYLNWYQQKPGKAPKLLIYDASNLETGVPSRFSGSGSGTDFTFTISSLQPEDIATYYCQQYDNLPITFGQGTRLEIK

SEQ ID NO: 1275 - protein, 107 aa, Homo sapiens
EIVMTQSPATLSVSPGERATLSCRASQSVSSNLAWYQQKPGQAPRLLIYGASTRATAIPARFSGSGSGTEFTLTISSLQSEDFAVYYCQQYNNWPRTFGQGTKVEIK

SEQ ID NO: 1276 - protein, 108 aa, Homo sapiens
SYELTQPPSVSVAPGQTARISCGGNNIGSKNVHWYQQKPGQAPVLVVYDDSDRPSGIPERFSGSNSGNTATLTISRVEAGDEADYYCQVWDSSSDPWVFGGGTKLTVL

SEQ ID NO: 1277 - protein, 110 aa, Homo sapiens
QSALTQPASVSGSPGQSITISCTGTSNDVGSYTLVSWYQQYPGKAPKLLIFEVTKRSSGISNRFSGSKSGNTASLTISGLQGEDEADYYCCSYAGASTFVFGGGTKLTVL

SEQ ID NO: 1278 - protein, 108 aa, Homo sapiens
EIVLTQSPGTLSLSPGERATLSCRASQSVSSTYLAWYQQKPGQAPRLLIYGASSRATGIPDRFSGSGSGTDFTLTISRLEPEDFAVYYCQQYGSSPWTFGQGTKVEIK

SEQ ID NO: 1279 - protein, 106 aa, Homo sapiens
IRMTQSPSSVSASVGDRVTITCRASQGISSWLAWYQQKPGKAPKLLIYVESSLQSGVPSRFSGSGSGTDFTLTISSLQPEDFATYYCQQANSFPLTFGGGTKVEIK

SEQ ID NO: 1280 - protein, 107 aa, Homo sapiens
DIQLTQSPSSLSASVGDRVTITCQASQDISNYLNWYQQKPGKAPKLLIYDASNLETGVPSRFSGSGSGTDFTFTISSLQPEDIATYYCQQYDNLPRSFGQGTKLEIK

SEQ ID NO: 1281 - protein, 108 aa, Homo sapiens
DIQLTQSPSSLSASVGDRVTITCRASQSISSYLNWYQQKPGKAPKLLIYAASSLQSGVPSRFSGSGSGTDFTLTISSLQPEDFATYYCQQSYSTPPWTFGQGTKVEIK

SEQ ID NO: 1282 - protein, 108 aa, Homo sapiens
EIVLTQSPGTLSLSPGERATLSCRASQSVSSSYLAWYQQKPGQAPRLLIYGASSRATGIPDRFSGSGSGTDFTLTISRLEPEDFAVYYCQQYVSSPWTFGQGTKVEIK

SEQ ID NO: 1283 - protein, 107 aa, Homo sapiens
EIVLTQSPATLSLSPGERATLSCRASQSVSSYLAWYQQKPGQAPRLLIYDASNRATGIPARFSGSGSGTDFTLTISSLEPEDFAVYYCQQRSNWPRGFGQGTKVEIK

SEQ ID NO: 1284 - protein, 107 aa, Homo sapiens
EIVLTQSPGTLSLSPGERATLSCRASQSVSGSYLAWYQQRPGQAPRLLIYGASSRATGIPDRFSGSGSGTDFTLTISRLEPEDFAVYYCQQYGSSLTFGGGTKVEIK

SEQ ID NO: 1285 - protein, 108 aa, Homo sapiens
DIQLTQSPSFLSASVGDRVTITCRASQGISSYLAWYQQKPGKAPKLLIYAASTLQSGVPSRFSGSGSGTEFTLTISSLQPEDFATYYCQQLNSYPQGTFGGGTKVEIK

SEQ ID NO: 1286 - protein, 107 aa, Homo sapiens
EIVMTQSPATLSVSPGERATLSCRASQSVSSNLAWYQQKPGQGPRLLIYGASTRATGIPARFSGSGSGTEFTLTISSLQSEDFAVYYCQQYNNWPRTFGQGTKVEIK

SEQ ID NO: 1287 - protein, 107 aa, Homo sapiens
LTQPASVSGSPGQSITISCTGTSSDVGSYNLVSWYQQHPGKAPKLMIYEDSKRPSGVSNRFSGSKSGNTASLTISGLQAEDEADYYCCSYAGSSTRLFGGGTKLTVL

SEQ ID NO: 1288 - protein, 108 aa, Homo sapiens
DIQLTQSPSSLSASVGDRVTITCRASQSISSYLTWYQQKPGKAPKLLIYAASSLQSGVPSRFSGSGSGTDFTLTISSLQPEDFATYYCQQSYSTPPWTFGQGTKVEIK

SEQ ID NO: 1289 - protein, 108 aa, Homo sapiens; identical to SEQ ID NO: 1281

SEQ ID NO: 1290 - protein, 108 aa, Homo sapiens
DIQLTQSPSSLSASVGDRVTITCRASQSISSYLNWYQQKPGKAPKLLIYVASSLQSGVPSRFSGSGSGTDFTLTISSLQPEDFATYYCQQSYSTPPITFGQGTRLEIK

SEQ ID NO: 1291 - protein, 106 aa, Homo sapiens
DIVMTQTPATLSLSPGERATLSCRASQSVSSYLAWYQQKPGQAPRLLIYDASNRATGIPARFSGSGSGTDFTLTISSLEPEDFAVYYCQQRRNWGTFGPGTKVDIK

SEQ ID NO: 1292 - protein, 109 aa, Homo sapiens
DIVMTQSPSSLSASVGDRVTITCRASQSISRYLNWYQQKPGKAPKLLIYAASSLQSGVPSRFSGSGSGTDFTLTISSLQPEDFATYYCQQSYSTPPEYTFGQGTKLEIK

SEQ ID NO: 1293 - protein, 109 aa, Homo sapiens
DIVMTQSPSFLSASVGDRVTITCRASQGISSYLAWYQQKPGKAPKLLIYAASTLQSGVPSRFSGSGSGTEFTLTISSLQPEDFATYYCQQLNSYPPKFTFGPGTKVEIK

SEQ ID NO: 1294 - protein, 110 aa, Homo sapiens
QSALTQPASVSGSPGQSLTISCTGTSSDVGGYNYVSWYQQHPDKAPKLMIYDVNNRPSGVSNRFSGSKSGSTASLTISGLQAEDEADYYCSSYAGSSTQVFGGGTKLTVL

SEQ ID NO: 1295 - protein, 110 aa, Homo sapiens
QSVLTQPASVSGSPGQSITISCTGTSSDVGGYNYVSWYQQHPGKVPKLMIYDVSNRPSGVSNRFSGSKSGNTASLTISGLQAEDEADYYCSSYTSSSAQLFGGGTKLTVL

SEQ ID NO: 1296 - protein, 110 aa, Homo sapiens
QSALTQPASVSGSPGQSITISCTGTSSDVGGYNYVSWYQQHPDKAPKLMIYDVSNRPSGVSNRFSGSKSGNTASLTISGLQAEDEADYYCSSYTSGSTQVFGGGTKLTVL

SEQ ID NO: 1297 - protein, 107 aa, Homo sapiens
DVVMTQSPSSLSASVGDRVTITCQASQDISNYLNWYQQKPGKAPKLLIYDASNFATGVPSRFSGTGSGTDFTFTISSLQPEDIATYYCQQYDNLPITFGQGTRLEIK

SEQ ID NO: 1298 - protein, 112 aa, Homo sapiens
DVVMTQSPLSLPVTLGQPASISCRSSQSLVYSDGNTYLNWFQQRPGQSPRRLIYKVSNRDSGVPDRFSGSGSGTDFTLKISRVEAEDVGVFYCMQGTHWPPTFGQGTKVDIK

SEQ ID NO: 1299 - protein, 111 aa, Homo sapiens
QAVLTQPPSVSGAPGQRVTISCTGSSSNIEAGYDVHWYQQLPGTAPKLLIYVNSNRPSGVPDRFSGSKSGTSASLAITGLQAEDEADYYCQSYDSSLSGVVFGGGTKLIVL

SEQ ID NO: 1300 - protein, 108 aa, Homo sapiens
SYELTQPPSVSVAPGQTARITCGGNNIGSKSVHWYQQKPGQAPVLVVYDDSDRPSGIPERFSGSNSGNTATLTISRVEAGDEADYYCQVWDSSSDPWVFGGGTKLTVL

SEQ ID NO: 1301 - protein, 109 aa, Homo sapiens
SYELTQPPSVSVAPGKTARITCGGNNIGSKSVHWYQQKPGQAPVLVVYDDTDRPSGIPERFSGSSSGNTATLTISRVEAGDEADYYCQVWDSSSDHPVVFGGGTKLTVL

SEQ ID NO: 1302 - protein, 114 aa, Homo sapiens
NFMLTQPHSVSESPGKTVTISCTRSSGSIANNYVKWYQQRPGSSPTTVIYEDNQRPSGVPDRFSGSIDSSSNSASLTISGLKTEDEADYYCQSYDSSNHEEIWVFGGGTKLIVL

SEQ ID NO: 1303 - protein, 108 aa, Homo sapiens
SYELTQSPSVSVAPGQTARITCGGNNIGSKSVHWYQRKPGQAPVLVVYDDSDRPSGIPERFSGSNSGNTATLTISRVEAGDEADYYCQVWDNNSDHLVFGGGTKLTVL

SEQ ID NO: 1304 - protein, 108 aa, Homo sapiens
EIVMTQSPGTLSLSPGERATLSCRASQSVSSSYLAWYQQKPGQAPRLLIYGVSSRATGIPDRFSGSGSETDFTLTISRLEPEEFAVYYCQQYGSSPRTFGQGTKLEIK

SEQ ID NO: 1305 - protein, 111 aa, Homo sapiens
QSVLTQPPSASSTPGQRVTISCSGSSSNIGSNYVYWYQQLPGTAPKLLIYTNNQRPSGVPDRFSGSKSGTSASLAISGLRSEDEADYYCAAWDDSLSGRVVFGGGTKLTVL

SEQ ID NO: 1306 - protein, 110 aa, Homo sapiens
QAVVTQPPSASGTPGQRVTISCSGSSSNIGSNTVNWYQQLPGTAPKLLIYSNNQRPSGVPDRFSGSKSGTSASLAISGLQSEDEADYYCAAWDDSLNGPVFGGGTKLTVL

SEQ ID NO: 1307 - protein, 108 aa, Homo sapiens
SYELTQPPSVSVSPGQTARITCSGDALPKQYAYWYQQKPGQAPVLVIYKDSERPSGIPERFSGSSSGTTATLTISGVQAEDEADYYCQSADSSGTYLVVFGGGTKLAV

SEQ ID NO: 1308 - protein, 107 aa, Homo sapiens
DIQLTQSPSSLSASVGDRVTITCRASQSISSYLNWYQQKPGKAPKLLIYAASNLQSGVPSRFSGSGSGTDFTLTISSLQPEDFATYYCQQSYSTPWTFGQGTKVEIK

SEQ ID NO: 1309 - protein, 110 aa, Homo sapiens
QSALTQPPSASGTPGQRVTISCSGSSSNIGSNTVNWYQQLPGTAPKVLVYSNDQRPSGVPDRFSGSKSGTSASLAISGLQSEDEADYYCAAWDDSLNGPVFGGGTKLTVL

SEQ ID NO: 1310 - protein, 111 aa, Homo sapiens
QTVVTQEPSLTVSPGGTVTLTCVSSTGAVTSGYYPNWFQQKPGQAPRALIYSTSKKHSWTPARFSGSLLGGKAALTLSGVQPEDEAEYYCLLYYGGAQRWVFGGGTKLTVL

SEQ ID NO: 1311 - protein, 112 aa, Homo sapiens
QSVLTQPASVSGSPGQSITISCTGTSSDVGSYNLVSWYQQHPGKAPKLMIYEGSKRPSGVSNRFSGSKSGNTASLTISGLQAEDEADYYCYSYAGSSTFVFVFGTGTKVIVL

SEQ ID NO: 1312 - protein, 110 aa, Homo sapiens
QSALTQPPSASGTPGQRVTISCSGSSSNIGSNYVYWYQQLPGAAPKLLIYRNDQRPSGVPDRFSGSKSGTSVSLAISGLRSEDEADYYCAAWDDSLSGWVFGGGTKLTVL

SEQ ID NO: 1313 - protein, 107 aa, Homo sapiens
EIVLTQSPGTLSLSPGERATLSCRASQSVSSYLAWYQQKPGQAPRLLIYGASSRATGIPDRFSGSGSGTDFTLTISRLEPEDFAVYYCQQYGSSPRTFGQGTKLEIK

SEQ ID NO: 1314 - protein, 110 aa, Homo sapiens
QSVLTQPPSASGSPGQSVTISCTGTSSDVGGYDYVSWYQQHPGKAPKLMIYEVSKRPSGVPDRFSGSKSGNTASLTVPGLQAEDEADYYCTSYAGSNNFVFGGGTKLIVL

SEQ ID NO: 1315 - protein, 110 aa, Homo sapiens
QTVVTQPASVSGSPGQSITISCTGTSSDVGGYNYVSWYQQHPDKAPKLIIYDVSNRPSGVSNRFSGSKSGNTASLTISGLQAEDEAAYYCSSYTSSSTQVFGGGTKLTVL

SEQ ID NO: 1316 - protein, 110 aa, Homo sapiens
QSALTQPTSVSGSPGQSITISCTGTSSDVGGYNYVSWYQQHPGKAPKLIIYDVSNRPSGVSNRFSGSKSGNTASLTISGLQAEDEADYYCSSYTVSSTQVFGGGTKLTVL

SEQ ID NO: 1317 - protein, 110 aa, Homo sapiens
QPVLTQPASVSGSPGQSLTISCTGTSSDIGGFNYVSWYQQHPGKAPKLMIFDVSKRPSGVPNRFSGSKSGNTASLTISGLQAEDEGDYYCSSYTISSAQVFGGGTKLTVL

SEQ ID NO: 1318 - protein, 110 aa, Homo sapiens
QSALTQPASVSGSPGQSITISCTGTSSDVGGYNHVSWYQQHPGKAPKLMIYDVSNRPSGVSNRFSGSKSGNTASLTISGLQAEDEADYYCSSYTSSSAQLFGGGTKLTVL

SEQ ID NO: 1319 - protein, 110 aa, Homo sapiens
QSVLTQPASVSGSPGQSITISCTGTSSDVGGYNYVSWYQQHPGKVPKLMIYDVSNRPSGVSNRFSGSKSGNTASLTISGLQAEDEADYYCSSYTSSSAQVFGGGTKLTVL

SEQ ID NO: 1320 - protein, 107 aa, Homo sapiens
DIQLTQSPSSLSASVGDRVTITCRASQTASSYLNWYQQKPGKAPNLLIYAASSLQSGVPSRFSGSGSVTDFTLTISSLQPEDFATYYCQQSYSTPPTFGQGTKVDIK

SEQ ID NO: 1321 - protein, 107 aa, Homo sapiens
DIQMTQSPSSLSASVGDRVTITCRASQNISSYLNWYQQEAGKAPKLLIYAASSLQSGVPSRFSGSGSGTDFTLTISSLQPEDFATYYCQQSYSTPRTFGQGTKVDIK

SEQ ID NO: 1322 - protein, 108 aa, Homo sapiens
DIQMTQSPSSLSASVGDRVTITCRASQGIRNDLGWYQQKPGKAPKRLIYAASSLQSGVPSRFSGSGSGTEFTLTISSLQPEDFATYYCLQHNSYPILTFGGGTKLEIK

SEQ ID NO: 1323 - protein, 109 aa, Homo sapiens
QLVLTQPPSVSVAPGKTARITCGGNNIGSKSVYWYQQKPGQAPVLVVYDDSDRPSGIPERFSGSNSGNTATLTISRVEAGDEADYYCQVWDSSSDHPYVFGSGTKVTVL

SEQ ID NO: 1324 - protein, 108 aa, Homo sapiens
EIVLTQSPGTLSLSPGERATLSCRASQSVSSSYLAWYQQKPGQAPRLLIYGASSRATGIPDRFSGSGSGTDFTLTISRLEPEDFAVYYCQHYGSSLWTFGQGTKLEIK

SEQ ID NO: 1325 - protein, 112 aa, Mus musculus
DVLMTQTPLSLPVSLGDQASISCRSSQSIVHSNGNTYLEWYLQKPGQSPKLLIYKVSNRFSGVPDRFSGSGSGTDFTLKISRVEAEDLGVYYCFQGSHVPLTFGAGTKLELK

SEQ ID NO: 1326 - protein, 109 aa, Homo sapiens [sequence omitted]

SEQ ID NO: 1327 - protein, 110 aa, Homo sapiens; identical to SEQ ID NO: 1273

SEQ ID NO: 1328 - protein, 112 aa, Homo sapiens
DIVMTQSPLSLPVTPGEPASISCRSSQSLLHSNGYNYLDWYLQKPGQSPQLLIYLGSNRASGVPDRFSGSGSGTDFTLKISRVEAEDVGVYYCMQALQTPGTFGPGTKVDIK

SEQ ID NO: 1329 - protein, 112 aa, Homo sapiens; identical to SEQ ID NO: 1328

SEQ ID NO: 1330 - protein, 110 aa, Homo sapiens
QSALTQPASVSGSPGQSITISCTGTSGDVGSYNLVSWYQQHPGKAPKLVIYEATKRPSGVSNRFFASKSGNTASLTISGLQAEDEADYYCCSYAGVRTVVFGGGTKLTVL

SEQ ID NO: 1331 - protein, 110 aa, Homo sapiens
QSALTQPASVSGSPGQSITISCTGTSGDIGSYNLVSWYQQYPGKAPKLIIYEASKRPSGVSNRFFASKSGNTASLTISGLQAEDEADYYCCSYAGVRTVVFGGGTKLTVL

SEQ ID NO: 1332 - protein, 108 aa, Homo sapiens; identical to SEQ ID NO: 1251

SEQ ID NO: 1333 - protein, 107 aa, Homo sapiens
DIQMTQSPSSLSASVGDRVTITCQASQDISTYLNWYQQKPGKAPKLLIYDASNLETGVPSRFSGSGSGTDFTFTISSLQPEDIATYYCQQYDNLLFTFGPGTKVDVK

SEQ ID NO: 1334 - protein, 111 aa, Homo sapiens
QSALTQPASVSGSPGQSITISCTGTSGDVGAYNYVSWYQQHPVKAPKLMIYDVSKRPSGVSNRFSGSKSGNTASLTISGLQTEDEADYYCSSYTSSSTLWVFGGGTKLTVL

SEQ ID NO: 1335 - protein, 86 aa, Homo sapiens
ITCRASQSISSYLNWYQQKPGKAPKLLIYAASSLQSGVPSRFGGSASGTDFTLTISSLQPEDFATYYCQQSYSTFTFGPGTKVDIK

SEQ ID NO: 1336 - protein, 113 aa, Homo sapiens
DIVMTQSPDFLAVSLGERATINCKSSQSVLHTPKNKNYLAWYKQKPGQPPKVLIYWASTRESGVPERFSGSGSGTDFTLIISSLQAEDAAVYYCQQYYTAPLTFGGGTKVEIK

SEQ ID NO: 1337 - protein, 108 aa, Homo sapiens
EIVLTQSPATLSLSPGERATLSCRASQSVSSYLAWYQQKPGQAPRLLIYDTSNRATGIPARFSGSGSGTDFTLTISSLEPEDFAVYYCQQRSNWPPYTFGQGTKLEIK

SEQ ID NO: 1338 - protein, 110 aa, Homo sapiens
QSALTQPASVSGSPGQSITISCTGTSSDVGGYHYVSWYQHHPGKAPKLIIYDVIKRPSGVSNRFSGSKSGNTASLTISGLQAEDEAYYYCSSYTSSTTWVFGGGTRLTVL

SEQ ID NO: 1339 - protein, 112 aa, Homo sapiens
QSVLTQPPSVSGAPGQRVTISCTGSSSNIGAGYNVHWYQQLPGTAPKLLIYGNNNRPSGVPDRFSGSKSGTSASLAITGLQAEDEADYYCQSFDSSLSGSDVFGTGTKVSVL

SEQ ID NO: 1340 - protein, 111 aa, Homo sapiens
QSVLTQPPSASGTPGQRVTISCSGSSSNIGSNYVYWYQQLPGTAPKLLIYRNNQRPSGVPDRFSGSKSGTSASLAISGLRSEDEADYYCAAWDASLSGHVVFGGGTKLTVL

SEQ ID NO: 1341 - protein, 113 aa, Homo sapiens
DIVMAQTPLSLPVTPGEPASISCRSSQSLLDSDDGNTYFDWYLQKPGQSPQLLIYTLSYRASGVPDRFSGSGSGTDFTLKINRVEAEDVGVYYCMQRIEFPWTFGQGTKLEIK

SEQ ID NO: 1342 - protein, 113 aa, Homo sapiens; identical to SEQ ID NO: 1336

SEQ ID NO: 1343 - protein, 107 aa, Homo sapiens
DIQMTQSPSSLSASVGDRVTITCRASQGITNYLAWFQQKPGKAPKSLIYAVSSLQSGVPSKFSGSGSGTDFTLTISSLQPEDFATYYCQQYNSYPWTFGQGTKVEIK

SEQ ID NO: 1344 - protein, 109 aa, Homo sapiens
SYELTQPPSVSVSPGQTARITCSGDALPKQYAYWYQQKPGQAPVLVIYKDSERPSGIPERFSGSSSGTTVTLTISGVQAEDEADYYCQSADSSGTYFWVFGGGTKLTVL

SEQ ID NO: 1345 - protein, 113 aa, Homo sapiens; identical to SEQ ID NO: 1336

SEQ ID NO: 1346 - protein, 110 aa, Homo sapiens
QSVLTQPPSVSGTPGQRVTISCSGSNSKIGSYSVNWYQQLPGTAPKLLIYRNNQRPSGVPDRFFGSKSGTSASLAISGLQSEDEADYYCSVWDDSLNGPLFGGGTKLTFV

SEQ ID NO: 1347 - protein, 106 aa, Homo sapiens
SYELTQPPSVSVSPGQTARITCSGDAWPNQYAYWYQQKPGQAPVLVIYKDTERPSGIPERFSGSSSGTTVTLTISGVQAEDEADYFCQSSDSSGVVFGGGTKLTVL

SEQ ID NO: 1348 - protein, 107 aa, Homo sapiens
DIQMTQSPSTLSASVGDRVTITCRASQSISSWLAWYQQKPGKAPKLLIYKASSLESGVPSRFSGSGSGTEFTLTISSLQPDDFATYYCQQYNSYSWTFGQGTKVEIK

SEQ ID NO: 1349 - protein, 110 aa, Homo sapiens
QSVLTQPPSASGTPGQRVTISCSGSNSKIGSYSVNWYQQLPGTAPKLLIYRNNQRPSGVPDRFSGSKSGTSASLAISGLQSEDEADYYCSVWDDSLNGPLFGGGTKLTFL

SEQ ID NO: 1350 - protein, 107 aa, Homo sapiens
DIQMTQSPSSLSASVGDRVTITCRASQSISSYLNWYQQKPGKAPKLLIYAASSLQSGVPSRFSGSGSGTDFTLTISSLQPEDFATYYCQQSYSTPPTFGGGTKVQIK

SEQ ID NO: 1351 - protein, 107 aa, Homo sapiens
DIQMTQSPSSLSASVGDRVTITCRASQSISSYLNWYQQRPGKAPKLLIYAASSLQSGVPSRFSGSGYGTDFTLTISSLQPEDFATYYCQQSYNTPRTFGQGTKVEIK

SEQ ID NO: 1352 - protein, 106 aa, Homo sapiens
DIQMTQSPSSVSASVGDRVTITCRASQGISSWLAWYQQKPGKAPKLLIYAASSLQSGVPSRFSGSGSGTDFTLTISSLQPEDFATYYCQQTNSFPTFGQGTRLEIR

SEQ ID NO: 1353 - protein, 107 aa, Homo sapiens
EIVLTQSPGTLSLSPGERATLSCRASQSVSSSFLAWYQQKPGQAPRLLIYGASNRATGIPDRFSGSGSGTDFTLTISRLEPEDFAVYYCQQYGNSPQFGPGTKVDIK

SEQ ID NO: 1354 - protein, 108 aa, Homo sapiens
DIQMTQSPSSLSASVGDRVTITCRASQSISNWLAWYQQKPGKAPKLLIYKASSLESGVPSRFSGSGSGTEFTLTISSLQPDDFATYYCQQYNSYSTWTFGQGTKVEIK

SEQ ID NO: 1355 - protein, 107 aa, Homo sapiens
DIQMTQSPSSLSASVGDRVTITCRASQSISSFLNWYQQKPGKAPKLLIYAAFNLQSGVPSRFSGSGSGTDFTLTISSLQSEDFATYYCQQSYNTPYTFGQGTKLEIK

SEQ ID NO: 1356 - protein, 110 aa, Homo sapiens
QSVLTQPPSASGTPGQRVIISCSGSSSNIGSNTVKWYHQLPGTAPKLLICSNNQRPSGVPDRFSGSKSDTSASLAISGLQSEDEADYYCAAWDDSLNALVFGGGTKLTVL

SEQ ID NO: 1357 - protein, 107 aa, Homo sapiens
DIQMTQSPSSLSASVGDRVTITCRASQSIAGYLNWYQQKPGKAPKLLIYGTTSLQSGVPVRFSGSGSGTDFTLTISSLQPEDFATYYCQQSYSTPGTFGQGTRLEIK

SEQ ID NO: 1358 - protein, 108 aa, Homo sapiens
DIQMTQSPSSLSASVGDRVTITCQASQDINHYLNWYQQKPGKAPKLLIYDASNLETGVPSRFSGSGSGTDFTFTITSLQPEDVATYYCQQSDNLPMYTFGQGTKLEIK

SEQ ID NO: 1359 - protein, 109 aa, Homo sapiens
SYVLTQPPSVSVAPGKTARITCEGNNIGSKSVHWYQQKPGQAPVLVVYDDSGRPSGIPERFSGSNSGNTATLTISRVEAGDEADYFCQVWDSSSDHHVVFGGGTKLTVL

SEQ ID NO: 1360 - protein, 110 aa, Homo sapiens
QSVLTQPPSASGTPGQRVTISCSGSNSNIGSYTVNWYQQFPGTAPKLLIYDNNQRTSGVPDRFSGSKSGTSASLAISGLQSEDEANYYCLVWDDSLNGLVFGGGTKLTVL

SEQ ID NO: 1361 - protein, 112 aa, Homo sapiens
QSVLTQPPSVSGAPGQRVTISCTGSSSNIGSGSDVHWYQQLPGTAPKLLIYGNTNRPSGVPDRFSGSKSGTSASLAITGLQAEDEADYYCQSYDSRLSGFVVFGGGTKLTVL

SEQ ID NO: 1362 - protein, 107 aa, Homo sapiens
DIQMTQSPSSLSASVGDRVTITCRASQSISNYLNWYQQKPGKAPKLLIYAASSLQSGVPSRFSGSGSGTDFSLTISSLQPEDFATYSCQQSYTTLLTFGGGTKVEIK

SEQ ID NO: 1363 - protein, 108 aa, Homo sapiens
EIVLTQSPGTLSLSPGERATLSCRASQSVSSSYLGWYQQKPGQAPRLLIYGASSRATGIPDRFSGSGSGTDFTLTISRLEPEDFAVYYCQQYGSSPWTFGQGTKVEIK

SEQ ID NO: 1364 - protein, 111 aa, Homo sapiens
QSVLTQPPSVSGAPGQRVTLSCTGSNSNIGAGYDVHWYQQLPGTAPKLLIYGNSNRPSGVPDRFSGSKSGTSASLAITGLQAEDEADYYCQSYDSSLSDSVFGGGTKVTVL

SEQ ID NO: 1365 - protein, 107 aa, Homo sapiens
DIQLTQSPSFLSASVGDRVTITCRASQGISNYLAWYQQKPGTAPNLLIYAASTLQSGVPSRFSGSGSGTEFTLTISSLQPEDFATYYCQLLNSHPLTFGQGTRLEIK

SEQ ID NO: 1366 - protein, 108 aa, Homo sapiens
SSELTQDPAVSVALGQTVRITCQGDSLRSYYASWYQQKPGQVPILVIYDKNNRPSGIPDRFSGSSSGNTASLTITGAQAEDEADYYCNSRDSSGNAVVFGGGTKLTVL

SEQ ID NO: 1367 - protein, 107 aa, Homo sapiens
DIQMTQSPSSLSASVGDRVTITCQASQDISNYLNWYQQKPGKAPKLLIYDASNLETGVPSRFSGSGSGTDFTFTISSLQPEDIATYYCQQYANLPFTFGPGTKVDIK

SEQ ID NO: 1368 - protein, 108 aa, Homo sapiens; identical to SEQ ID NO: 1366

SEQ ID NO: 1369 - protein, 110 aa, Homo sapiens
QSVLTQAPSASGTPGQRVTISCSGSNSNIGSYTINWYQQLPGTAPKLLIYGNDQRTSGVPDRFSGSKFGTSASLAISGLQSEDENNYYCAVWDDSLNGLVFGGGTKLTVL

SEQ ID NO: 1370 - protein, 107 aa, Homo sapiens
DIQMTQSPSSLSASVGDRVTITCRASQNIASYLNWYQQKPGKAPKLLIYAASSLQSGVPSRFSGSGSGTDFTLTISSLQPEEFATYYCQQSYSTPWTFGQGTKVEIK

SEQ ID NO: 1371 - protein, 107 aa, Homo sapiens
DIVMTQSPATLSVSPGERAILSCRASQSVRSNLAWYQQKPGQAPRLLISGASTRATAIPARFSGSGSGTEFTLTITSLQSEDCAVYYCHQYNNWPQTFGQGTKVEIK

SEQ ID NO: 1372 - protein, 112 aa, Homo sapiens
NFMLTQPHSVSESPGKTVTISCTGSSGSIASNYVQWYQQRPGSAPTTVISEDNQRPSGVPDRFSGSIDSSSNSASLTISGLKTEDEADYYCQSYDGINRAWVFGGGTKLTVL

SEQ ID NO: 1373 - protein, 112 aa, Homo sapiens
DIVMTQSPLSLPVTPGEPASISCRSSQSLLHSLGYNSLSWYLQKPGQSPHLLIYLGSNRASGVPDRFSGSGSATDFTLKISRLEAEDVGVYYCMQALQTPLTFGQGTRLEIK

SEQ ID NO: 1374 - protein, 108 aa, Homo sapiens
DIQMTQSPSSLSACVGDRVTITCRASQSISSYLNWYQQKPGKGPKLLIYAASSLQSGVPSRFSGSGSGTDFTLTISSLQPEDFATYYCQQSYSSLSITFGQGTRLEIK

SEQ ID NO: 1375 - protein, 108 aa, Homo sapiens
DIQMTQSPSSLSASVGDRVTITCRASQSISSYLNWYQQKPGKAPKLLIYAASSLESGVPSRFSGSGSGTDFTLTISSLQPEDFATYYCQQSYEIPPWTFGQGTKVEIK

SEQ ID NO: 1376 - protein, 107 aa, Homo sapiens
DIQMTQSPSSLSASVGDRVTITCQASQDINNYLNWYQQKPGKAPKLLIYDASNLETGVPLRFSGSGSGTDFIFTISSLQPEDIATYYCQQYDNLPPVFGGGTKVEIK

SEQ ID NO: 1377 - protein, 111 aa, Homo sapiens
QSVLTQPPSVSGAPGQRVTISCTGSSSNIGAGYDVHWYQQLPETAPKLLIYANSNRPSGVPDRFSGSKSGTSASLAITGLQAEDEADYYCQSYDSSLSGSVFGGGTKLTVL

SEQ ID NO: 1378 - protein, 110 aa, Homo sapiens
NFMLTQPHSVSESPGKTVTISCTGSSGSIASNYVQWYQQRPGSAPTTVIYEDNQRPSGVPDRFSGSIDSSSNSASLTISGLKTEDEADYYCQSYDSGNPIFGGGTKLTVL

SEQ ID NO: 1379 - protein, 112 aa, Homo sapiens
DIVMTQSPDSLAVSLGERATINCKSSQSVLYSSNNKNYLAWYQQKPGQPPKLLMYWASTRESGVPDRFSGSGSGAEFTLTISSLQAEDVAIYYCQQYYSTLTFGGGTKVEIK

SEQ ID NO: 1380 - protein, 107 aa, Homo sapiens
DIQMTQSPSSLSASVGDRVTITCQASQDINNYLNWYQQKPGKAPKLLIYDASNLETGVPLRFSGSGSGTDFTFTISSLQPEDIATYYCQQYDNLPPVFGGGTKVEIK

SEQ ID NO: 1381 - protein, 112 aa, Homo sapiens
NFMLTQPHSVSESPGKTVTFSCTGSSGSIASNYVQWYQQRPGSAPTTVIYEDNQRPSGVPDRFSGSIDSSSNSASLTISGLKTEDEADYYCQSYDGINRWLVFGGGTKLTVL

SEQ ID NO: 1382 - protein, 117 aa, Homo sapiens
QPVLTQPPSASASLGASVTLTCTLSSGYSNYKVDWYQQRPGKGPRFVMRVGTGGIVGSKGDGIPDRFSVLGSGLNRYLTIKNIQEEDESDYHCGADHGSGSNFEYVVFGGGTKLTVL

SEQ ID NO: 1383 - protein, 110 aa, Homo sapiens
QSVVTQPPSASGTPGQRVTISCSGSSSNIGYNIVNWYQQLPGTAPKLLIYSNNQRPSGVPDRFSGSKSGTSASLSISGLQSEDEADYYCAAWDDSLNGYVFGTGTKVTVL

SEQ ID NO: 1384 - protein, 107 aa, Homo sapiens
DIQLTQSPSFLSASVGDRVTITCRASQGISSYLAWYQQKPGKAPKLLIYAASTLQSGVPSRFSGSGSGTEFTLTISSLQPEDFATYYCQQLNSYPVTFGQGTKVEIK

SEQ ID NO: 1385 - protein, 112 aa, Homo sapiens
QSALTQPASVSGSPGQSITISCTGTSSDVGDYNYVSWYQQHPGKAPKLMIYDVSNRPSGVSNRFSGSKSGNTASLTISGLQAEDEAEYYCSSYTSSSTLLYVFGTGTKVTVL

SEQ ID NO: 1386 - protein, 109 aa, Homo sapiens
SYVLTQPPSVSVAPGKTARITCGGNNIGNKGVHWYQQKPGQAPVLVVDDDSDRPSGIPERFSGSNSGNTATLIISSVEVGDEADFYCQVWDSSSDHPGVFGGGTKLTVL

SEQ ID NO: 1387 - protein, 109 aa, Homo sapiens
EIVLTQSPATLSLSPGERATLSCRASQSVSSFLAWYQQKPGQAPRLLIYDASNRATGIPARFSGSGSGTDFTLTISSLEPEDFAVYYCHYRSNWPPVLTFGGGTKVEIE

SEQ ID NO: 1388 - protein, 108 aa, Homo sapiens
DIQMTQSPSSLSASVGDRVTITCQASQDITNYLNWYQQKPGKAPKLLIYDASNLETGVPSRFSGSGSGTDFTFTISSLQPEDFATYYCQQYDNLYSVHFGQGTKLEIK

SEQ ID NO: 1389 - protein, 112 aa, Homo sapiens; identical to SEQ ID NO: 1385

SEQ ID NO: 1390 - protein, 112 aa, Homo sapiens; identical to SEQ ID NO: 1385

SEQ ID NO: 1391 - protein, 107 aa, Homo sapiens; identical to SEQ ID NO: 1365

SEQ ID NO: 1392 - protein, 109 aa, Homo sapiens
EIVLTQSPATLSLSPGERATLSCRASQSVSSFLAWYQQKPGQAPRLLIYDASNRPTGIPARFTGSGSGTDFTLTISSLEPEDFAVYYCQHRTNWPPLFTFGPGTKVDIK

SEQ ID NO: 1393 - protein, 106 aa, Homo sapiens
SYELTQPPSVSVSPGQTASITCSGDKLGDKYACWYQQRPGQSPVLVIYQDSKRPSGIPERFSGSNSGNTATLTISGTQAMDEADYYCQAWDSSTGVFGTGTKVTVL

SEQ ID NO: 1394 - protein, 107 aa, Homo sapiens
DIQMTQSPSTLSASVGDRVTITCRASQSVSTWLAWYQQKPGKAPNLLIYEASSLESGVPSRFSGSGSGTEFTLTISSLQPDDFATYYCQQYNTYSGTFGQGTKVEIK

SEQ ID NO: 1395 - protein, 106 aa, Homo sapiens; identical to SEQ ID NO: 1393

SEQ ID NO: 1396 - protein, 107 aa, Homo sapiens
DIQMTQSPSSLSASVGDRVTITCRARQSISNYLNWYQQKPGKAPKLLIYAASSLHSGVPSRFSGSGSGTDFTLTISSLQPEDFATYYCQQTYSTFWTFGQGTNVEIK

SEQ ID NO: 1397 - protein, 106 aa, Homo sapiens
SYELTQPPSVSVSPGQTASITCSGDKLGDKYACWYQQKPGQSPVVVIYQDSKRPSGIPERFSGSNSGNTATLTISGTQAMDEADYYCQAWDSSTAVFGGGTKLTVL

SEQ ID NO: 1398 - protein, 110 aa, Homo sapiens
QSALTQPASVSGSPGQSITISCTGTSSDVGGYNYVSWYQQHPGKAPKLMIYDVSNRPSGVSNRFSGSKSGNTASLTISGLQAEDEADYCCSSYTSSRAVLFGGGTKLTVL

SEQ ID NO: 1399 - protein, 110 aa, Homo sapiens
SYVLTQPPSVSVAPGKTANITCGGNNIGRKSVHWYQQKSGQAPVLVVYDDSDRPSGIPERFSGSNSGNTATLTISRVEAGDEADYYCQVWDSSSDHPEWVFGGGTKLTVL

SEQ ID NO: 1400 - protein, 106 aa, Homo sapiens
DIQMTQSPSSLSASVGDRVTITCRASQSISSYLNWYQQKPGKAPKLLIYGASSLQTGVPSRFSGSGSGTDFTLTIRSLQPEDFASYYCQQSYSTPTFGGGTKVEIK

SEQ ID NO: 1401 - protein, 111 aa, Homo sapiens
QSALTQPASVSGSPGQSITISCTGTSSDIGGYNYVSWYQQHPGKAPKLLIYDVSNRPSGVSTRFSGSKSGNTASLTISGLQAEDEADYYCSSYTSSSTHVVFGGGTKLTVL

SEQ ID NO: 1402 - protein, 107 aa, Homo sapiens; identical to SEQ ID NO: 1394

SEQ ID NO: 1403 - protein, 113 aa, Homo sapiens
DIVMTQSPDFLAVSLGERATISCKSSQSVLYTPKNKNYLAWYKQKPGQPPKVLIYWASTRESGVPDRFSGSGSGTDFTLIISSLQAEDAAVYYCQQYYTAPLTFGGGTRVEIK

SEQ ID NO: 1404 - protein, 109 aa, Homo sapiens
EIVLTQSPGTLSLSPGERATLSCRASQSVSSSYLAWYQQKPGQAPRLLIYGASSRATGIPDRFSGSGSGTDFTLTISRLEPEDFAVYYCQHYGSSRGWTFGQGTKVEIK

SEQ ID NO: 1405 - protein, 108 aa, Homo sapiens
EIVLTQSPGTLSLSPGERATLSCRASQSVSSNFLAWYQQKPGQAPRLLIYGASSRATGIPDRFSGSGSGTDFTLTISRLEPEDFAVYYCQQYGRSPITFGQGTRLEIK

SEQ ID NO: 1406 - protein, 106 aa, Homo sapiens
SYELTQPPSVSVSPGQTASITCFGDKLGDKYACWFQQKPGQSPVLIIYQGAKRPSGIPERFSGSNSGNTATLTISGTQAMDEADYYCQAWDSSTVVFGGGTKLTVL

SEQ ID NO: 1407 - protein, 107 aa, Homo sapiens
DIQMTQSPSSLSASVGDRVTITCRASQTITNYLNWYQLKSGRAPKLLIYAASSLQSGVPSRFSGSGSGTDFTLTISSLQPEDFATYYCQQSYSTPYTFGQGTKLEIK

SEQ ID NO: 1408 - protein, 110 aa, Homo sapiens
QSVLTQPPSVSGAPGQRVTISCTGSSSNIGAGYDVHWYQQLPGTAPKLLIFINSNRPSGVPDRFSGSKSGTSASLAITGLQAEDEADYYCQSYDSSLGALFGGGTKLTVL

SEQ ID NO: 1409 - protein, 107 aa, Homo sapiens
DIQMTQSPSSVSASVGDRVTITCRASQGISSWLAWYQQKPGKAPKLLIYDASSLQSGVPSRFSGSGSGTDFTLTISSLQPEDFATYYCQQANSFPPTFGPGTKVDIK

SEQ ID NO: 1410 - protein, 106 aa, Homo sapiens
EIVLTQSPAILSLSPGERATLSCRASQSVSSYLAWYQQKPGQAPRLLIYDTSNRATGIPARFSGSGSGTDFTLTISSLEPEDFAFYYCQQRGNWWTFAQGTKVEIK

SEQ ID NO: 1411 - protein, 109 aa, Homo sapiens; identical to SEQ ID NO: 1392

SEQ ID NO: 1412 - protein, 108 aa, Homo sapiens
EIVMTQSPATLSVSPGERATLSCRASQSVSNNLAWYQHKPGQAPRLLIYGASTRATGIPARFSGSGSGTEFTLTISSLQSEDFAVYFCQQCYNWPPWTFGQGTKVEIK

SEQ ID NO: 1413 - protein, 109 aa, Homo sapiens
EIVLTQSPATLSLSPGERATLSCRASQSVSSYLAWYQQKPGQAPRLLIYDASNRATGIPARFSGSGSGTDFTLTISSLDPEDFAVYYCHKRSNWPPSLTFGGGTKVEIK

SEQ ID NO: 1414 - protein, 113 aa, Homo sapiens
DIVMTQSPDSLAVSLGERATINCKSSQSVLYSSNNKNSLAWYQQKPGQPPKLLIYWASTRESGVPDRFSGSGSGTDFTLTISSLQAEDVAVYYCQQYYSISWTFGQGTKVEIK

SEQ ID NO: 1415 - protein, 111 aa, Homo sapiens
QSALTQPASVSGSPGQSITISCTGTSSDVGSYNLVSWYQQHAGKAPKLMIYEVIKRPSGVSNRFSGSKSGNTASLTISGLQAEDEADYYCCSYAVSTTYVIFGGGTKLTVL

SEQ ID NO: 1416 - protein, 113 aa, Homo sapiens
DIVMTQSPDSLAVSLGERATINCKSSQSVLHSSNNKDSLVWYQQKPGQPPKLLIYWASSRESGVPDRFSGSGSGTDFTLTISSLQAEDVAVYYCQQYYSTPWTFGQGTKVEIK

SEQ ID NO: 1417 - protein, 117 aa, Homo sapiens
QPVLTQPPSASASLGASVTLTCTLSSGYSNYKVDWYQQRPGKGPRFVMRVGTGGIVGSKGDGIPDRFSVLGSGLNRYLTIKNIQEEDESDYHCGADHGSGSNFVFVVFGGGTKLTVL

SEQ ID NO: 1418 - protein, 112 aa, Homo sapiens
DIVMTQSPLSLPVTPGEPASISCRSSQSLLHSNGYNYLDWYLQKPGQSPQFLIYLGSNRASGVPDRFSGSGSGTDFILKISRVEAEDVGVYYCMQALQTPFTFGPGTKVDIK

SEQ ID NO: 1419 - protein, 108 aa, Homo sapiens
EIVMTQSPATLSVSPGERATLSCRASQSVSSNLAWYQQKPGQAPRLLIYGASTRATGIPARFSGSGSGTEFTLTISSLQSEDFAVYYCQQYNYWPPLTFGGGTKVEIK

SEQ ID NO: 1420 - protein, 109 aa, Homo sapiens; identical to SEQ ID NO: 1359

SEQ ID NO: 1421 - protein, 107 aa, Homo sapiens
DIQMTQSPSTLSASVGDRVTITCRASHSISSWLAWYQQKPGKAPKLLIYKASSLESGVPSRFSGSGSGTEFTLTISSLQPDDFATYYCQQYNTYSQTFGQGTKVEIK

SEQ ID NO: 1422 - protein, 107 aa, Homo sapiens
FYELTQPPSVSVSPGQTAGITCSGDKLGHKYAYWYQQKPGQSPILLIYQDDKRPSGIPERFSGSNSGTIATLTISGTQPVDEADYYCQAWDNDAGVVFGGGTKLTVL

SEQ ID NO: 1423 - protein, 107 aa, Homo sapiens
DIQMTQSPSSLSASVGDRVTITCRASQGISNYLAWFQQKPGKAPKSLIYAASSLQSGVPSKFSGSGSGTDFTLTISSLQPEDVATYYCQQYNSHPPTFGGGTKVEIK

SEQ ID NO: 1424 - protein, 110 aa, Homo sapiens
QSALTQPPSASGSPGQSVTISCTGTSSDVGTYNYVSWYQQHPGKAPKLMIYEVSKRPSGVPDRFSGSKSGNTASLTVSGLQAEDEAEYYCSAYAGSNNLVFGGGTKLTVL

SEQ ID NO: 1425 - protein, 117 aa, Homo sapiens; identical to SEQ ID NO: 1382

SEQ ID NO: 1426 - protein, 108 aa, Homo sapiens
QSALTQPASVSGSHGQSITISCTGTSSDVGSYNLVSWYQQHPGKAPKLMIYEVSKRPSGVSNRFSGSTSGNTASLTISGLQAEDEADYYCCSYAGIVLFGGGTKVTVL

SEQ ID NO: 1427 - protein, 108 aa, Homo sapiens
SYELTQPPSVSVSPGQTTRITCSGDALPKQYGYWYQQKAGQAPILVIYKDSERPSGIPERFSGSSSGTTVTLTISGVQAEDEAHYYCQSGDSSGTYVVFGGGTKLTVL

SEQ ID NO: 1428 - protein, 110 aa, Homo sapiens
SYELTQPPSVSVSPGQTARITCSGDALSKQYAYWYQQKPGQAPVLVIYKDSERPSGIPERFSGSSSGTTVTLTISGVQAEDEADYYCQSVDRSGTYFNWVFGGGTKLTVL

SEQ ID NO: 1429 - protein, 107 aa, Homo sapiens; identical to SEQ ID NO: 1407

SEQ ID NO: 1430 - protein, 109 aa, Homo sapiens
QTVVTQEPSLTVSPGGTVTLTCASSAGAVTSGYYPNWFQQKPGQAPRALIYSTANKHSWTLARFSGSLLGGKAALTLSGVQPEDEAEYYCLLYYGGAWVFGGGTKLTVL

SEQ ID NO: 1431 - protein, 112 aa, Homo sapiens
NFMLTQPHSVSESPGKTVTISCTGSSGSIASNYVQWYQQRPGSAPTTVIYEDNQRPSGVPDRFSGSIDSSSNSASLTISGLMTEDEADYYCQSYDGSNHAVVFGGGTKLTVL

SEQ ID NO: 1432 - protein, 108 aa, Homo sapiens
SYVLTQPPSVSVAPGKTARITCGGNNIGSKNVHWYQQKPGQAPVVVVYDDSDRPSGIPERFSGSNSGNTATLTISRVEAGDEADYYCQVWDSSSDPVVFGGGTKLTVL

SEQ ID NO: 1433 - protein, 112 aa, Homo sapiens
NIVMTQSPLSLPVTPGEPASISCRSSQSLLNSNGLTYLDWYLQKPGQSPQLLIYFVSNRASGVSDRFSGSGSGADFTLTISRVEAEDVGVYYCMQALQTPQTFGQGTKVEIK

SEQ ID NO: 1434 - protein, 107 aa, Homo sapiens
EIVLTQSPGTLSLSPGERATLSCGASQSISSSYLAWYQQKPGQAPRLLIYGASSRAAGIPDRFSGSGSGTDFTLTISRLEPEDFAVYFCQQYGGSLTFGGGTKVEIK

SEQ ID NO: 1435 - protein, 106 aa, Homo sapiens
SYELTQPPSVSVSPGQTASITCSGDKMGDKYACWYQQKPGQSPVVVIYEDNKRPSGIPERFSGSNSGNTATLTISGTQAMDEADYYCQAWDSSLVVFGGGTKLTVL

SEQ ID NO: 1436 - protein, 110 aa, Homo sapiens
QSALTQPPSVSGSPGQSVTISCTGTSSDVGSYNRVSWYQQPPGTAPKLMIYEVSNRPSGVPDRFSGSKSGNTASLTISGLQAEDEADYYCSSYTSSSLRVFGGGTKLTVL

SEQ ID NO: 1437 - protein, 107 aa, Homo sapiens; identical to SEQ ID NO: 1384

SEQ ID NO: 1438 - protein, 110 aa, Homo sapiens
QSALTQPRSVSGSPGQSVTISCTGTSSDVGGYNYVSWYQQHPGKAPKLMIYDVTKRPSGVPERFSGSKSGNTASLTISGLQAEDEADYSCCSYAGSYTYVFGTGTKVTVL

SEQ ID NO: 1439 - protein, 111 aa, Homo sapiens
QSALTQPASVSGSPGQSITISCTGTGSDVGGSNYVSWYQQHPGKAPKLMIYDVSNRPSGVSNRFSGSKSGNTASLTISGLQAEDEADYYCSSYTSSSTLVLFGGGTKLSVL

SEQ ID NO: 1440 - protein, 109 aa, Homo sapiens
EIVLTQSPATLSLSPGERATLSCRASQSVSSFLAWYQQKPGQAPRLLIYDASNRATGIPARFSGSGSGTDFTLTISSLEPEDFAVYYCQQRSNWPPSYTFGQGTKLEIK

SEQ ID NO: 1441 - protein, 110 aa, Homo sapiens
QSALTQPASVSGSPGQSITISCTGTSSDIGGYNYVSWYQQHPGKAPKLMIYDVSNRPSGVSNRFSGSKSGNTASLTISGLQAEDEADYYCSSYTSISTWVFGGGTKVTVL

SEQ ID NO: 1442 - protein, 108 aa, Homo sapiens
SYELTQPSSVSVSPGQTARITCSGDALPKRYAYWYRQKSGQAPVLVIHEDSKRPSGIPERFSGSTSGTMATLTITGAQLEDEADYYCFSMDSSGDLRVFGGGTKLTVL

SEQ ID NO: 1443 - protein, 108 aa, Homo sapiens
DIQMTQSPSSLSASVGDRVTITCRASQSISTYLNWYQQKPGKAPKLLIYAASSLQSGVPSRFSGSGSGTDFTLTISSLQPEDYATYYCQQSYSTPGLTFGGGTKVEIK

SEQ ID NO: 1444 - protein, 110 aa, Homo sapiens
QSALTQPASVSGSPGQSITISCTGTSSDVVGYNYVSWYQQHPGKAPKLMIYDVRNRPSGVSNRFSGSKSGNTASLTISGLQAEDEADYFCISYTSSRTLVFGGGTKLTVL

SEQ ID NO: 1445 - protein, 109 aa, Homo sapiens
SYVLTQPPSVSVAPGKTARITCGGNNIGSKNVHWYQQKPGQAPVLVVYDDSDRPSGIPERFSGSNSGNTATLTISRVEAGDEADYYCQVWDSSYYHPVVFGGGTKLTVL

SEQ ID NO: 1446 - protein, 110 aa, Homo sapiens; identical to SEQ ID NO: 1360

SEQ ID NO: 1447 - protein, 110 aa, Homo sapiens
QSVLTQPPSVSAAPGQKVTISCSGSSSNIGNNYISWYQQLPGTAPKLLIYDNNKRPSGIPDRFSGSKSGTSATLGITGLQTGDEADYYCGTWDSSLSAVVFGGGTKLTVL

SEQ ID NO: 1448 - protein, 107 aa, Homo sapiens
DIQMTQSPSTLSASVGDRVTITCRASQSINSWLAWYQQKPGKAPKLLIYKASSLESGVPSRFSGSGSGTEFTLTISSLQPDDFATYYCQQYSIYSWTFGQGTKVEIK

SEQ ID NO: 1449 - protein, 107 aa, Homo sapiens
DIQMTQSPSSLSACVGDRVTITCRASQSISSYLNWYQQKPGKGPKLLIYAASSLQSGVPSRFSGSGSGTDFTLTISSLQPEDFATYYCQQSYSTPWTFGQGTKVEIK

SEQ ID NO: 1450 - protein, 107 aa, Homo sapiens
DIQMTQSPSSVSASVGDRVTITCRASQGISSWLAWYQQKPGKAPKLLIYAASSLQRGVPSRFSGSGSGTDFTLTISSLQPEDFATYYCQQANSLPLTFGGGTKVEVK

SEQ ID NO: 1451 - protein, 110 aa, Homo sapiens
QSVLTQPPSASGTPGQRVTISCSGSSSNIESNSVNWYQQLPGTAPKLLIYSNNQRPSGVPDRFSGSKSGTSASLAISGLQSEDEADYYCAAWDDSLNGVVFGGGTKLTVL

SEQ ID NO: 1452 - protein, 110 aa, Homo sapiens
QSVLTQPPSASGTPGQRVTISCSGSTSNIGSNTVNWYQQLPGTAPKLLIYSNNQRPSGVPDRFSGSKSGPSASLAISGLQSVDEADYYCAAWDDSLNGWVFGGGTKLTVL

SEQ ID NO: 1453 - protein, 106 aa, Homo sapiens
SYELTQSPSVSVSPGQTASITCSGDKLGDKYACWYQQRPGQSPVLVIYQDSQRPSGIPERFSGSNSGNTATLTISGTQAMDEADYYCQAWDSSTAVFGGGTKLTVL

SEQ ID NO: 1454 - protein, 107 aa, Homo sapiens; identical to SEQ ID NO: 1371

SEQ ID NO: 1455 - protein, 106 aa, Homo sapiens
DIQMTQSPSSLSASVGDRVTITCRASQSISTYLNWYQQKPGKAPKLLIYAASSLQSGVPSRFSGSGSGTDFTLTISSLQPEDFATYHCQQSYSTLTFGGGTKVEIK

SEQ ID NO: 1456 - protein, 109 aa, Homo sapiens
EIVLTQSPATLSLSPGERATLSCRASQSVSSYLAWYQQKPGQAPRLLIYDASNRATGIPARFSGSGSGTDFTLTISSLEPEDFAVYYCQHRSNWPPRLTFGGGTKVEIK

SEQ ID NO: 1457 - protein, 107 aa, Homo sapiens; identical to SEQ ID NO: 1357

SEQ ID NO: 1458 - protein, 107 aa, Homo sapiens
EIVLTQSPGTLSLSPGERATLSCRASQSVSSSYLAWYQQKPGQAPRLLIYGASSRATGIPDRFSGSGSGTDFTLTISRLEPEDFAVYYCQQYGSSYTFGQGTKLEIK

SEQ ID NO: 1459 - protein, 107 aa, Homo sapiens; identical to SEQ ID NO: 1396

SEQ ID NO: 1460 - protein, 110 aa, Homo sapiens
QSVLTQPPSASGTPGQRVTISCSGSSSNIGSNYVYWYQQLPGTAPKLLISRNNQRPSGVPDRFSGSKSGTSASLAISGLRSEDEADYYCAAWDDSLSSWVFGGGTKLTVL

SEQ ID NO: 1461 - protein, 110 aa, Homo sapiens; identical to SEQ ID NO: 1378

SEQ ID NO: 1462 - protein, 106 aa, Homo sapiens
SYELTQPPSVSVSPGQTASITCSGDKLGDKYSSWYQQKPGQSPVLVIYEDTKRPSGIPERFSGSNSGNTATLTISGTQAMDEADYYCQAWSSSTAVFGGGTKLTVL

SEQ ID NO: 1463 - protein, 111 aa, Homo sapiens
QSALTQPASVSGSPGQSITISCTGTSSDVGGYNYVSWYQQHPGKAPKLMIYYVSNRPSGVSNRFSGSKSGNTASLTISGLQAEDEADYYCSSYTSSTLNVLFGGGTKLTVL

SEQ ID NO: 1464 - protein, 107 aa, Homo sapiens
DIQMTQSPSSLSASVGDRVTITCRARQSISNYLNWYQQKPGKAPKLLIYAASSLHSGVPSRFSGSGSGTDFTLTISSLQPEDFATYYCQQSYSTPGTFGQGTRLEIK

SEQ ID NO: 1465 - protein, 112 aa, Homo sapiens
QSVLTQPPSVSGAPGQRVTISCTGSSSNIGAGYDVHWYQHLPGTAPKLLIYGNSNRPSGVPDRFSGSKSGTSASLAITGLQAEDEADYYCQSYDSSLSGWSVFGTGTKVTVL

SEQ ID NO: 1466 - protein, 112 aa, Homo sapiens; identical to SEQ ID NO: 1385

SEQ ID NO: 1467 - protein, 108 aa, Homo sapiens
DIQMTQSPSSLSASVGDRVTITCRASQSISIYLNWYQQKPGKAPKLLIYAASTLQSGVPSRFSGSGSGTDFTLTISSLQPEDFATYYCQQSYSTHMSTFGQGTKLEIK

SEQ ID NO: 1468 - protein, 110 aa, Homo sapiens
DIVVTQTPLSLSVTPGQPASISCKSSETLLHSDGKTYLSWYLQKPGQPPQLLIYEVSNRFSGVPDRFSGSGSGTDFTLKIGRVEAEDVGLYYCMQSIQLAFGQGTRLEIE

SEQ ID NO: 1469 - protein, 108 aa, Homo sapiens; identical to SEQ ID NO: 1419

SEQ ID NO: 1470 - protein, 109 aa, Homo sapiens
SSELTQDPAVSVALGQTVTITCQGDSLRSHYASWYKVKPGQAPLLVIYGRNNRPSGIPDRFSGSRSGNTASLTITGAQVDDEADYYCSSGDSSTDHHVVFAGGTKLAVV

SEQ ID NO: 1471 - protein, 107 aa, Homo sapiens
DMEVTQFPSSLSASIGDRVTITCRATQSISTYLNWYQQKPGKAPNLLIYSASHLQRGVPARFSGSGSGTEFTLTITTLQPEDVGTYYCHQSYGVPITFGGGTKVDIK

SEQ ID NO: 1472 - protein, 109 aa, Homo sapiens
EIVMTQSPATLSVSPGERATLSCRASQSVSSNLAWYQQKPGQAPRLLIYGASTRATGIPARFSGSGSGTEFTLTISSLQSEDFAVYYCQQYNNWPPMYTFGQGTKLEIK

SEQ ID NO: 1473 - protein, 111 aa, Homo sapiens
NFMLTQPHSVSESPGKTVTISCTGSSGSIASNYVQWYQQRPGSAPTTVIYEDNQRPSGVPDRFSGSIDSSSNSASLTISGLKTEDEADYYCQSYDSSKYVVFGGGTKLTVL

SEQ ID NO: 1474 - protein, 108 aa, Homo sapiens; identical to SEQ ID NO: 1363

SEQ ID NO: 1475 - protein, 113 aa, Homo sapiens
DIVMTQSPLSLPVTPGEPASISCRSSQSLLHSNGYNYLDWYLQKPGQSPQLLIYLGSTRASGVPDRFSGSGSGTDFTLKISRVEAEDVGVYYCMQALQTPLYTFGQGTKLEIK

SEQ ID NO: 1476 - protein, 108 aa, Homo sapiens; identical to SEQ ID NO: 1374

SEQ ID NO: 1477 - protein, 109 aa, Homo sapiens; identical to SEQ ID NO: 1413

SEQ ID NO: 1478 - protein, 108 aa, Homo sapiens
SNELTQPPSVSVSPGQTARITCSGDALPKQYAYWYQQKPGQAPVLVIYKDTERPSGIPERFSGSSSGTTVTLTISGVQAEDEADYYCQSTASSGTYVVFGGGTKLTVL

SEQ ID NO: 1479 - protein, 107 aa, Homo sapiens
DIQMTQSPSTLSASVGDRVTITCRASQSISSWLAWYQQKPGKAPKLLIYKASSLESGVPSRFSGSGSGTEFTLTISSLQPDDFATYYCQQYNSYSPTFGQGTKVEIK

SEQ ID NO: 1480 - protein, 112 aa, Homo sapiens; identical to SEQ ID NO: 1381

SEQ ID NO: 1481 - protein, 107 aa, Homo sapiens
EIVMTQSPATLSVSPGERATLSCRASQSVSSNLAWYQQKPGQAPRLLIYGASTRATGIPARFSGSGSGTEFTLTISSLQSEDFAVYYCQQYNNWPGTFGQGTKVEIK

SEQ ID NO: 1482 - protein, 109 aa, Homo sapiens
EIVLTQSPGTLSLSPGERATLSCRASQSVSSSYLAWYQQKPGQAPRLLIYGASSRATGIPDRFSGSGSGTDFTLTISRLEPEDFAVYYCQQYGSSPPYTFGQGTKLEIK

SEQ ID NO: 1483 - protein, 117 aa, Homo sapiens
QPVLTQPPSASASLGASVTLTCTLSSGYSNYKVDWFQQRPGKGPRFVMRVGTGGIVGSKGDGIPDRFSVLGSGLNRYLTIKNIQEEDESDYHCGADHGSGSNFVYVVFGGGTKLTVL

SEQ ID NO: 1484 - protein, 109 aa, Homo sapiens
EVVLTQSPGTLSLSPGERATLSCRASQSVSSSYLAWYQQKPGQAPRLLIYGASSRATGIPDRFSGSGSGTDFTLTISRLEPEDFAVYHCQHFGSSSQWTFGQGTKVEIK

SEQ ID NO: 1485 - protein, 109 aa, Homo sapiens
QTVVTQEPSLTVSPGGTVTLTCASSTGAVTSGYFPNWFQQKPGQAPRALIFSTNNRHSWTPARFSGSLLGDKAALTLSGVQPEDEAEYYCLLYYGGPWVFGGGTKLTVL

SEQ ID NO: 1486 - protein, 107 aa, Homo sapiens
EIVMTQSPGTLSVSPGERATLSCRASQTLSSNLAWYQQKPGQAPRLLIYGASTRATGIPARFSGSGSGTEFTLTISSLQSEDFAVYHCQQYNNWPLAFGQGTKVEIK

SEQ ID NO: 1487 - protein, 111 aa, Homo sapiens
QSALTQPASVSGSPGQSITISCTGTSSDIGSYNLVSWYQQYPGKAPKLMIYEVSKRPSGVSNRFSGSKSGNTASLTISGLQAEDEADYYCCSYAGGNTFVVFGGGTKLTVL

SEQ ID NO: 1488 - protein, 107 aa, Homo sapiens
EIVMTQSPATLSVSPGERATLSCRASQSVSSNLAWYQQKPGQAPRLLIYGASTRATGIPARFSGSGSGTEFTLTISSLQSEDFAVYYCQQYNNWPRTFGQGNRVEIN

SEQ ID NO: 1489 - protein, 111 aa, Homo sapiens
QSALTQPASVSGSPGQSITISCTGTSSDVGGYNYVSWYQQHPGKAPKLMIYDVSNRPSGVSNRFSGSRSGNTASLTISGLQAEDEADYYCSSYTSSSTPVVFGGGTKLTVL

SEQ ID NO: 1490 - protein, 112 aa, Homo sapiens
DIVMTQSPLSLPVTPGEPASISCRSSQSLLHSNGYNYLDWYLQKPGQSPHLLIYLGSNRASGVPDRFSGSGSGTDFTLKISRVEAEDVGVYYCMQALQTPRTFGQGTKVEIK

SEQ ID NO: 1491 - protein, 107 aa, Homo sapiens; identical to SEQ ID NO: 1370

SEQ ID NO: 1492 - protein, 110 aa, Homo sapiens; identical to SEQ ID NO: 1369

SEQ ID NO: 1493 - protein, 108 aa, Homo sapiens; identical to SEQ ID NO: 1412

SEQ ID NO: 1494 - protein, 106 aa, Homo sapiens; identical to SEQ ID NO: 1393

SEQ ID NO: 1495 - protein, 107 aa, Homo sapiens
DIQMTQSPSSLSASVGDRVTITCQASQDISKYLNWYQQKPGKAPKLLIYDASNLERGVPSRFSGSGSGTDFTFTISSLQAEDIATYYCQQYHNLPRTFGQGTKVEIK

SEQ ID NO: 1496 - protein, 107 aa, Homo sapiens
DIQLTQSPSFLSASVRDRVTITCRASQGISSYLAWYQQKPGKAPKLLIYAASTLQSGVPSRFSGSGSGTEFTLTISSLQPEDFATYYCQQLNSYPFTFGPGTKVDIK

SEQ ID NO: 1497 - protein, 113 aa, Homo sapiens; identical to SEQ ID NO: 1414

SEQ ID NO: 1498 - protein, 111 aa, Homo sapiens
QSALTQPASVSGSPGQSITISCTGTSSDVGGYNYVSWYQQHPGKAPKLMIYDVGNRPSGVSNRFSGSKSGNTASLTISGLQAEDEADYYCSSYTSSSTLYVFGTGTKVTVL

SEQ ID NO: 1499 - protein, 107 aa, Homo sapiens
DIQMTQSPSSLSASVGDRVTFTCRASQGISNYLAWYQQKPGKVPKLLIYAASTLQSGVPSRFSGIGSGTDFTLTISSLQPEDVATYYCQKYNSAPWTFGQGTKVEIK

SEQ ID NO: 1500 - protein, 106 aa, Homo sapiens
SYELTQPPSVSVSPGQTASITCSGDKLGDKFVCWYQQKPGQSPVLVIYQDNKRPSGIPERFSGSNSGNTATLTISGTQALDEADYYCQAWDSSTGVFGGGTKLTVL

SEQ ID NO: 1501 - protein, 107 aa, Homo sapiens
DIQLTQSPSFLSASVGDRVTITCRASQGISSYLAWYQQKPGKAPKLLMYAASTLQSGVPSRFSGSGSGTEFTLTINTLQPEDFATYYCQQLNSYPITFGQGTRLEIK

SEQ ID NO: 1502 - protein, 110 aa, Homo sapiens
QSVLTQPPSASGTPGQRVTFSCSGSNSNIGSYTVNWYQQLPGTAPKLLIYDNNQRPSGVPDRFSGSKSGTSASLAISGLQSEDEADYYCAVWDDSLNGLVFGGGTKLTVL

SEQ ID NO: 1503 - protein, 110 aa, Homo sapiens
QSVLTQPPSVSEAPRQRVTISCSGSSSNIGNNAVNWYQQLPGKAPKLLIYYDDLLPSGVSDRFSGSKSGTSASLAISGLQSEDEADYYCAAWDDSLNGVVFGGGTKLTVL

SEQ ID NO: 1504 - protein, 107 aa, Homo sapiens
DIQMTQSPSSLSASVGDRVTITCRASQSITSYLNWYQQRPGKAPKLLIYAASSLQSGVPSRFSGSGSGTDFTLSISSLQPEDFATYYCQQSYTTLLTFGGGTKVEIK

SEQ ID NO: 1505 - protein, 111 aa, Homo sapiens
QSALTQPASVSGSPGQSITISCTGTSSDVGGYNFVSWHQQHPGKAPKNMIYDVSKRPSGVSNRFSGSKSGNTASLTISGLHTEDEADYYCSSYTSTSTPWVFGGGTKLTVL

SEQ ID NO: 1506 - protein, 108 aa, Homo sapiens
EIVMTQSPGTLSVSPGERATLSCRASQSLSSHLAWYQQKPGQAPRLLIYGVSTRATGIPARFSGSGSGTEFTLAISSLQSEDSAVYYCQQYHVWPPITFGQGTRLEIK

SEQ ID NO: 1507 - protein, 113 aa, Homo sapiens
DIVMTQSPDSLAVSLGERATINCKSSQSVLYSSNNKNYLAWYQQKPGQPPKLLIYWASTRESGVPDRFSGSGSGTDFTLTISSLQAEDVAVYYCQQYYSTPLTFGQGTKVEIK

SEQ ID NO: 1508 - protein, 107 aa, Homo sapiens
DIQMTQSPSSVSASVGDRVTITCRASQGISSWLAWYQQKPGKAPKLLIYAASSLQSGVPSRFSGSGSGTDFTLTITSLQPEDFATYYCQQGNSFPLTFGGGTKVEIK

SEQ ID NO: 1509 - protein, 111 aa, Homo sapiens
QSVLTQPPSVSGAPGQRVTISCTGSSSNIGAGYDVHWYQQIPGTAPKLLFYGNNNRPSGVPDRFSDSKSGTSASLAITGLQAEDEADYYCQSYDSSLSAWVFGGGTKLTVL

SEQ ID NO: 1510 - protein, 107 aa, Homo sapiens; identical to SEQ ID NO: 1421

SEQ ID NO: 1511 - protein, 109 aa, Homo sapiens
EIVLTQSPATLSLSPGERATLSCRASQSVSSYLAWYQQKPGQAPRLLIYDASNRATGIPARFSGSGSGTDFTLTISSLEPEDFAVYYCQQRSNWPPGVTFGQGTRLEIK

SEQ ID NO: 1512 - protein, 107 aa, Homo sapiens
DIQMTQSPSSLSASVGDRVTITCQASQDIRNYLNWYQQKPGKAPELLIYDASNLETGVPSRFSGSGSGTDFIFTISSLQPEDIATYYCHQYDYLPYTFGQGTKLDIK

SEQ ID NO: 1513 - protein, 108 aa, Homo sapiens
DIQMTQSPSSLSASVGDRVTITCRASQSISSYLNWYQQKPGKAPKLLIYAATSLQSGVPSRFSGSGSGTDFTLTISSLQPEDFATYYCQQTYSTPLYTFGQGTKLEIK

SEQ ID NO: 1514 - protein, 109 aa, Homo sapiens; identical to SEQ ID NO: 1392

SEQ ID NO: 1515 - protein, 108 aa, Homo sapiens
SYELTQPPSVSVSPGQTARITCSGDALPNQYAYWYQQKPGQAPVLVMCKDSERPSGIPERFSGSSSGTTVTLTISGVQAEDEADYYCQSADSSGTYVVFGGGTKLTVL

SEQ ID NO: 1516 - protein, 107 aa, Homo sapiens; identical to SEQ ID NO: 1394

SEQ ID NO: 1517 - protein, 117 aa, Homo sapiens; identical to SEQ ID NO: 1417

SEQ ID NO: 1518 - protein, 113 aa, Homo sapiens
DIVMTQSPDSLAVSLGERATINCKSSQSLLYTSNNKNYLAWYQQKPGQPPKLLIYWASTRESGVPDRFSGSGSGTDFTLTISSLQAEDVAVYYCQQYYSPPWTFGQGTKVEIK

SEQ ID NO: 1519 - protein, 108 aa, Homo sapiens
DIQMTQSPSSLSASVGDRVTITCQASQDISNYLHWYQQKPGKAPKLLIYDASNLETGVPSRFSGSGSGTDFTFTISSLQPEDIATYYCQQYHNLPPITFGQGTRLEIK

SEQ ID NO: 1520 - protein, 107 aa, Homo sapiens
SYELTQPPSVSVSPGQTASITCSGDKLGETYVSWYQQKPGQSPVLVIYEDSKRPSGIPERFSGSNSGNTATLTISGTQAMDEADYYCQAWDSSTGGVFGTGTKVTVL

SEQ ID NO: 1521 - protein, 111 aa, Homo sapiens
DIQMTQSPSSLSASVGDRVTITCQASLDISKYLNWYQHKPGKAPNLLIYDAFNLERGVPSRFSGSGSGTDFTFTISSLQPEDIATYYCQQYDNLPPGVSTTFGQGTRLEIK

SEQ ID NO: 1522 - protein, 108 aa, Homo sapiens
SYELTQPPSVSVSPGQTARITCSGDALPKKYAHWYQQKSGQAPVLVIYEDSKRPSGIPERFSGSSSGTMATLTISGAQVEDEADYYCCSTDSSGNQRVFGGGTKLTVL

SEQ ID NO: 1523 - protein, 111 aa, Homo sapiens; identical to SEQ ID NO: 1401

SEQ ID NO: 1524 - protein, 108 aa, Homo sapiens
SYELTQPPSVSVSPGQTARITCSGDALPRQYTYWYQQKPGQAPVLVIYKDSERPSGIPERFSGSSSGTTVTLTISGVQAEDEADYYCQSADTIGTYWVFGGGTKLTVL

SEQ ID NO: 1525 - protein, 109 aa, Homo sapiens
EIVMTQSPATVSVSPGERATLSCRASQSVSSNLAWYQQKPGQAPRLLIYGASTRATGIPARFSASGSGTEFTLTISSLQSEDFAVYYCQQYNNWPPMYTFGQGTKVEIK

SEQ ID NO: 1526 - protein, 108 aa, Homo sapiens; identical to SEQ ID NO: 1388

SEQ ID NO: 1527 - protein, 108 aa, Homo sapiens
DIQMTQSPSSLSASVGDRVTITCRASQSISSYLNWYQQKPGKAPKLLIYAASSLKSGVPSRFGGSGSGTDFTLTISSLQPEDFATYYCQQSYEMPPWTFGQGTKVEIE

SEQ ID NO: 1528 - protein, 106 aa, Homo sapiens
SYELTQPPSVSVSPGQTARITCSGDALPNQYAYWYHQKPGQAPVVVIYKDSERPSGIPQRFSGSSSGTTVTLTISGVQAEDEADYYCQSADSSGYVFGTGTKVTVL

SEQ ID NO: 1529 - protein, 111 aa, Homo sapiens
QSALTQPASVSGSPGQSITISCTGTSSDVGGYNYVSWYQQHPGKAPKLMIYDVSKRPSGVSNRFSGSKSGNTASLTISGLQAEDEADYYCSSYTSSSIPYVFGTGTKVTVL

SEQ ID NO: 1530 - protein, 106 aa, Homo sapiens; identical to SEQ ID NO: 1410

SEQ ID NO: 1531 - protein, 108 aa, Homo sapiens
SYELTQPPSVSVSPRQTARITCSGDALPKKYAYWYQQKSGQAPVLVIYEDSKRPSGIPERFSGSSSGTMATLTISGAQVEDEADYYCYSTDTSGNHWVFGGGTKLTVL

SEQ ID NO: 1532 - protein, 108 aa, Homo sapiens
SYELTQPPSVSVSPGQTARITCSGDALPKKYAYWYQQKSGQAPVLVISEDSKRPSGIPERFSGSSSGTVATLTISGAQVEDEADYYCYSTDSSGNHRVFGGGTKLTVL

SEQ ID NO: 1533 - protein, 108 aa, Homo sapiens
EIVLTQSPGTLSLSPGERATLSCRASQSVSSTFLAWYQQKPGQAPRLLIFGASSRATGIPDRFSGSGSGTDFTLTISRLEPEDFAVYYCHQYGTSPYTFGQGTKLEIK

SEQ ID NO: 1534 - protein, 106 aa, Homo sapiens
EIVMTQSPATLSVSPGERVTLSCRASQSVSSNLAWYQQKPGQAPRLLIYGASTRATGIPARFSGGGSGTEFTLTISSLQSEDFAVYYCQQYNNFLTFGGGTKVEIK

SEQ ID NO: 1535 - protein, 112 aa, Homo sapiens
DIVMTQSPDSLAVSLGERATINCKSSQSVLYSSNNKNYLAWYQQKPGQPPKLLIYWASTRESGVPDRFSGSGSGTDFTLTISSLQAEDVAVYYCQQYYSTPGFGQGTKLEIK

SEQ ID NO: 1536 - protein, 111 aa, Homo sapiens; identical to SEQ ID NO: 1364

SEQ ID NO: 1537 - protein, 108 aa, Homo sapiens
SYELTQPPSVSVSPGQTARITCSGDALPNQYAYWYQQKPGQAPVLVIYKDSERPSGIPERFSGSSSGTTVTLTISGVQAEDEADYYCQSADSSGTSWVFGGGTKLTVL

SEQ ID NO: 1538 - protein, 108 aa, Homo sapiens
EIVLTQSPGTLSLSPGERASLSCRASQSVSSSYLAWYQQKPGQAPRLLIYGASSRATGIPDRFSGSGSGTDFTLTISRLEPEDFAVYYCQQYGSSPFTFGGGTKVEIK

SEQ ID NO: 1539 - protein, 107 aa, Homo sapiens
DIQMTQSPSTLSASVGDRVTITCRASQSISSWLAWYQQKPRKAPKLLIYKASTLESGVPSRFSGSGSGTEFTLTISSLQPDDFATYYCQQYNSYSLTFGGGTKVEIK

SEQ ID NO: 1540 - protein, 107 aa, Homo sapiens
EIVLTQSPATLSVSPGERATLSCRASQSVSSNLAWYQQKPGQAPRLLIYGASTRATGIPARFSGSGSGTDFTLTISSLQSEDFALYYCQQYNNWWRTFGQGTKVEIN

SEQ ID NO: 1541 - protein, 108 aa, Homo sapiens
SYELTQPPSVSVSPGQTARITCSGDALPKKYAYWYQQKSGQAPVLVIYEDSKRPSGIPERFSGSSSGTMATLTISGAQVEDEADYYCYSTDSSGNHWVFGGGTKLTVL

SEQ ID NO: 1542 - protein, 108 aa, Homo sapiens
SSELTQDPAVSVALGQTVRITCQGDSLRSYYASWYQQKPGQAPLLVIYGKNNRPSGIPDRFSGSSSGNTPSLTITGAQAEDEADYYCNFRDSSGHHPVFGEGTKLTVL

SEQ ID NO: 1543 - protein, 110 aa, Homo sapiens; identical to SEQ ID NO: 1356

SEQ ID NO: 1544 - protein, 107 aa, Homo sapiens; identical to SEQ ID NO: 1481

SEQ ID NO: 1545 - protein, 106 aa, Homo sapiens
SYELTQPSSVSVSPGQTARITCSGDVLAKNYARWFQQKPGQAPVLVIYKDSERPSGIPKRFSGSSSGTTVTLTISGAQVEDEADYYCYSAADNNRVFGGGTKLTVL

SEQ ID NO: 1546 - protein, 108 aa, Homo sapiens; identical to SEQ ID NO: 1366

SEQ ID NO: 1547 - protein, 108 aa, Homo sapiens
DIQMTQSPSSLSASVGDRVTITCQASQDISNSLSWYQQKPGKAPKLLIYDASNLKTGVPSRFSGSGSGTDFTFTISSLQPEDIATYYCQQYDNLLLFTFGPGTKVDIK

SEQ ID NO: 1548 - protein, 110 aa, Homo sapiens
EIVLTQSPATLSLSPGERATLSCRASQSVSSYLAWYQQKPGQAPRLLIYDASNRATGIPARFSGSGSGTDFTLTISSLEPEDFAVYYCQQRSNWPPRTWTFGQGTKVEIK

SEQ ID NO: 1549 - protein, 109 aa, Homo sapiens; identical to SEQ ID NO: 1387

SEQ ID NO: 1550 - protein, 108 aa, Homo sapiens
SSELTQDPAVSVALGQTVRITCQGDSLRSYYASWYQQKPGQVPILVIYDKNNRPSGIPDRFSGSSSGNTASLTITGAQAEDEADYYCNSRDSSGNAVVFGGGTKLTVA

SEQ ID NO: 1551 - protein, 110 aa, Homo sapiens
SSELTQDPAVSVALGQTVRITCQGDSLRSYYANWYQQKPGQAPVVVIFGKNNRPSGIPDRFSGSNSGNTASLTITGAQAEDEADYYCNSRDSSGYIWGWMFGGGTKLTVL

SEQ ID NO: 1552 - protein, 108 aa, Homo sapiens
SYVLTQPPSVSVAPGKTARITCGGNNIGSKSVHWYQQKPGQAPVVVVYDDSDRPSGLPERFSGSNSGNTATLTISRVEAGDEADYYCQVWDSSSDHWVFGGGTKLTVL

SEQ ID NO: 1553 - protein, 110 aa, Homo sapiens; identical to SEQ ID NO: 1408

SEQ ID NO: 1554 - protein, 111 aa, Homo sapiens
QLVLTQSPSASASLGASVKLTCTLSSGHTTYAIAWHQQQPEKGPRYLMKLNSDGSHTRGDGIPDRFSGSSSGAERYLTISSLQSEDEADYYCQSWDTGIGVFGGGTKLTVL

SEQ ID NO: 1555 - protein, 106 aa, Homo sapiens; identical to SEQ ID NO: 1406

SEQ ID NO: 1556 - protein, 111 aa, Homo sapiens
QSALTQPASVSGSPGQSITISCTGTSSDVGSYNLVSWYQQHPGKAPKLMIYEVSKRPSGVSNRFSGSKSGNTASLTISGLQAEDEADYYCCSYVGSSTYVVFGGGTKLTVL

SEQ ID NO: 1557 - protein, 107 aa, Homo sapiens
SYELTQPPSVSVSPGQTARITCSADALSKQYAYWYQQKPGQAPVVVIYKDSERPSGIPERFSGSSSGTTVTLTISGVQAEDEADYYCQSADSSSHWVFGGGTKLTVL

SEQ ID NO: 1558 - protein, 110 aa, Homo sapiens
NFMLTQPHSVSESPGKTVTISCTGNSGSIASNYVQWYQQRPGSAPTTVIYEDSQRPSGVPDRFSGSIDSSSNSASLTISGLKTEDEADYYCQSFDSGNVVFGGGTKLTVL

SEQ ID NO: 1559 - protein, 110 aa, Homo sapiens
QSVLTQPPSASGTPGQRVTISCSGSSSNIGSNTVNWYQQLPGTAPKLLIYNNNQRPSGVPDRLSGSKSGTSASLAISGLQSEDEADYYCVAWDDSRNGLVFGGGTKLTVL

SEQ ID NO: 1560 - protein, 112 aa, Homo sapiens
DIVMTQSPDSLAVSLGERATINCKSSQSVLYSSNNKNYLAWYQQKPGQPPKLLIYWASTRESGVPDRFSGSGSGTDFTLTISSLQAEDVAVYYCQQYYSTRTFGQGTKLEIK

SEQ ID NO: 1561 - protein, 114 aa, Homo sapiens
DIVMTQSPDSLAVSLGERATINCKSSQSVLYSSNNKNYLAWYQQKPGQPPKLLIYWASTRESGVPDRFSGSGSGTDFTLTISSLQAEDVAVYYCQQYYSTPPYTFGQGTKVEIK

SEQ ID NO: 1562 - protein, 110 aa, Homo sapiens
QSVLTQPPSASGTPGQRVTISCSGSNSNIGSYTVNWYQQFPGTAPKLLIYDNNQRTSGVPDRFSGSKSGTSASLAISGLQSEDEASYYCLAWDDSLNGLVFGGGTKLTVL

SEQ ID NO: 1563 - protein, 110 aa, Homo sapiens
QSVLTQPPSASGTPGQRVTISCSGSSSNIGSNYVYWYQQLPGTAPKLLIYSSNQRPSGVPDRFSGSKSGTSASLAISGLRSEDEADYYCAAWDASLSGWVFGGGTKLTVL

SEQ ID NO: 1564 - protein, 108 aa, Homo sapiens
SYELTQPPSVSVSPGQTARITCSADALPKHYAYWYQQRPGQAPVLVIYKDIERPSGIPERFSGSSSGTTVTLTITGAQAEDEADYYCQSVDGSGSSVVFGGGTKLAVL

SEQ ID NO: 1565 - protein, 107 aa, Homo sapiens
SYELTQPPSVSVSPGQTASITCSGDKLGDKYACWYQQKPGQSPVLVIHQDSQRPSGIPERFSGSNSGNTATLTISGTQAMDEADYYCQAWDSSTHVVFGGGTKLTVL

SEQ ID NO: 1566 - protein, 111 aa, Homo sapiens
QSALTQPASVSGSPGQSITISCTGTSSDVGGYNYVSWFQHHPDKAPRLMIYDVSKRPSGVSNRFSGSKSGNTASLTISGLQAEDEADYYCSSYTSSSTPFVFGTGTKVTVL

SEQ ID NO: 1567 - protein, 111 aa, Homo sapiens
QPVLTQSSSASASLGSSVKLTCTLSSGHSSYIIAWHQQQPGKAPRYLMKLEGSGSYNKGSGVPDRFSGSSSGADCYLTISNLQSEDEADYYCETWDSNTRVFAGGTKLTVL

SEQ ID NO: 1568 - protein, 108 aa, Homo sapiens
DIQMTQSPSSLSASVGDRVTITCRASQSISSYLNWYQQKPGKAPKLLIYAASSLQSGVPSRFSGSGSGTDFTLTISSLQPEDFATFYCQQSYSTPMHTFGQGTKLEIK

SEQ ID NO: 1569 - protein, 107 aa, Homo sapiens
DIQLTQSPSFLSASVGDRVTITCRASQGISSYLAWYQQKPGKAPKLLIYAASTLQSGVPSRFSGSGSGTEFTLTISSLQPEDFATYYCQQLNSYLGTFGQGTKVEIK

SEQ ID NO: 1570 - protein, 107 aa, Homo sapiens; identical to SEQ ID NO: 1409

SEQ ID NO: 1571 - protein, 110 aa, Homo sapiens; identical to SEQ ID NO: 1360

SEQ ID NO: 1572 - protein, 110 aa, Homo sapiens
QSALTQPASVSGSPGQSITISCTGTSSDVGSYNLVSWYQQHPGKAPKLMIYEVSKRPSGVSNRFSGSKSGNTASLTISGLQAEDEADYYCCSYAGSSTWGFGTGTKVTVL

SEQ ID NO: 1573 - protein, 109 aa, Homo sapiens
SYVLTQPPSVSVAPGKTARITCGGNNIGTKGVHWYQQKPGQAPVLVVYDDSDRPSGIPGRFSGSNSGNTATLTISRVEAGDEADYFCQVWDSSSDHHVVFGGGTKLTVL

SEQ ID NO: 1574 - protein, 112 aa, Homo sapiens
DIVMTQSPLSLPVTPGEPASISCRSSQSLLHSDGYTYLDWYLQKPGQSPQLLIYLGSKRASGVPDRFSGSGSGTDFTLKISRVEAEDVGVYYCMQALQTPLTFGGGTKVEIK

SEQ ID NO: 1575 - protein, 109 aa, Homo sapiens
EIVMTQSPGTLSVSPGERATLSCRASQSVSSNLAWYQQKPGQAPRLLIYGASTRATGVPARFSGSGSGTEFTLTISSLQSEDFAVYYCQQYNNWPPMYTFGQGTKLEIK

SEQ ID NO: 1576 - protein, 107 aa, Homo sapiens
EIVMTQSPATLSVSPGERATLSCRASQSVSSNLAWYQQKPGQAPRLLIYGASTRATGIPARFSGSGSGTEFTLTISSLQSEDFAVYYCQQYNNWPRTFGQGTKVEIK

SEQ ID NO: 1577 - protein, 107 aa, Homo sapiens
QPVVTQSPSASASLGASVKLTCTLDSGHRSYAIAWHQQRPEKGPRFLMRITTDGRHTKGDGIPDRFSGSGSGTERYLTISSLQSEDEADYYCQTWGTFGGGTRLTVL

SEQ ID NO: 1578 - protein, 112 aa, Homo sapiens
DIVMTQTPLSLSVTPGQPASISCKSSQSLLHSDGKTYLYWYLQKPGQSPQLLIYEVSNRFSGVPDRFSGSGSGTDFTLKISRVEAEDVGVYYCMQSIQPPLTFGGGTKVEIK

SEQ ID NO: 1579 - protein, 113 aa, Homo sapiens
DIVMTQSPDSLAVSLGERATINCKSSQSVLYSSNNKNYLAWYQQKPGQPPKLLIYWASTRESGVPDRFSGSGSGTDFTLTISSLQAEDVAVYYCQQYYSTPLTFGGGTKVEIK

SEQ ID NO: 1580 - protein, 111 aa, Homo sapiens
QSALTQPASVSGSPGQLITIFCNGSISDVGGWNYVSWYQQHPDKAPKMMIYDVRHRPSGVSSRFSGSKSGNTASLTISGLQAEDEGDYYCSSFTSRGALVLFGGGTKLTVL

SEQ ID NO: 1581 - protein, 108 aa, Homo sapiens
QSALTQPRSVSGSPGQSVTISCTGTSSDVGGYNYVSWYQQHPGKAPKLMIYDVSKRPSGVPDRFSGSKSGNTASLTISGLQAEDEADYYCCSYAGIWVFGGGTKLTVL

SEQ ID NO: 1582 - protein, 108 aa, Homo sapiens
EIVLTQSPGTLSLSPGERATLSCRASQSVSSSYLGWYHQKPGQAPRLLIYGASSRATGIPDRFSGSGSGTDFTLTISRLEPEDFAVYYCQHYGSSRSTFGQGTKLEIK

SEQ ID NO: 1583 - protein, 106 aa, Homo sapiens
DIQMTQSPSSLSASVGDRVTITCRARQSISNYLNWYQQKPGKAPKLLIYAASSLHSGVPSRFSGSGSGTDFTLTISSLQPEDFATYYCQQSYSTPTFGGGTKVEIK

SEQ ID NO: 1584 - protein, 107 aa, Homo sapiens
DIQMTQSPSSLSASVGDRVTITCRASQSISSYLNWYQQKPGKAPKLLIYAASSLHSGVPSRFSGSGSGTDFTLTISSLQPEDFATYYCQQSYSTPYTFGQGTKLEIK

SEQ ID NO: 1585 - protein, 109 aa, Homo sapiens
SSELTQDPAVSVALGQTVRITCQGDSLRSYYASWYQQKPRQAPVLIISGNNNRPSGIPDRFSGSSSGNTASLTITGAQAEDEADYYCNSRDSSGNHLRVFGGGTKLTVL

SEQ ID NO: 1586 - protein, 108 aa, Homo sapiens; identical to SEQ ID NO: 1405

SEQ ID NO: 1587 - protein, 108 aa, Homo sapiens
DIQMTQSPSSLSASVGDRVTITCQASQDISNYLNWYQQKPGKAPKLLIYAASNLETGVPSRFSGSGSGTDFTFTISSLQPEDIATYYCQQYDNLLQFTFGPGTKVDIK

SEQ ID NO: 1588 - protein, 106 aa, Homo sapiens
SYELTQPPSVSVSPGQTARITCSGDALPTKYAYWYQQKSGQAPVLVIYDDSKRPSGIPERFSGSSSGTMATLTISGAQVEDEADYYCYSTDSSGNVFGTGTKVTVL

SEQ ID NO: 1589 - protein, 107 aa, Homo sapiens
EIVMTQSPATLSVSAGERATLSCRASQSISSNLAWYHQKPGQAPRLLIYGASTRATGIPARFSGSGSGTEFTLTISSLQSEDFAVYYCQQYNSYSLTFGGGTKVEIK

SEQ ID NO: 1590 - protein, 108 aa, Homo sapiens
EIVLTQSPGTLSLSPGERATLSCRASQSVSSSYLAWYQQKPGQAPRLLIYGASSRATGIPDRFSGSGSGTDFTLTISRLEPEDFAVYYCQYYGSSPFGFGPGTKVDIK

SEQ ID NO: 1591 - protein, 109 aa, Homo sapiens
EIVLTQSPATLSLSPGERATLSCRASQSVSRFLAWYQQKPGQAPRLLIYDASNRATGIPARFSGSGSGTDFTLTISSLEPEDFAVYYCQQRSNWPPRLTFGGGTKVEIK

SEQ ID NO: 1592 - protein, 110 aa, Homo sapiens
QSVLTQPPSASGTPGQRVTISCSGSSSNIGSNTVNWYQQLPGTAPKLLIYSNNQRPSGVPDRFSGSKSGTSASLAISGLQSEDENNYYCAVWDDSLNGVVFGGGTKLTVL

SEQ ID NO: 1593 - protein, 110 aa, Homo sapiens
QSVLTQPPSASGTPGQRVTISCSGSSSNIGSNYVYWYQQLPGTAPKLLISRNNQRPSGVPDRFSGSKSGTSASLAISGLQSEDEANYYCLVWDDSLNGLVFGGGTKLTVL

SEQ ID NO: 1594 - protein, 110 aa, Homo sapiens; identical to SEQ ID NO: 1398

SEQ ID NO: 1595 - protein, 113 aa, Homo sapiens
DFVMTQSPGSLAVSLGERATINCRSSQSVLDNSSNKNHLAWHQQKPGQPPKLLIYWASTRESGVPDRFSGSGSGTDFTLTISSLQAEDVAVYYCQQYYSSHWTFGQGTKVEIK

SEQ ID NO: 1596 - protein, 110 aa, Homo sapiens
QSALTQPASVSGSPGQSITISCTGTSSDVGSYNLVSWYQQHPGKAPKLMIYEVSKRPSGVSNRFSGSKSGNTASLTISGLQAEDEADYYCYSYAGSSTWVFGGGTKLTVL

SEQ ID NO: 1597 - protein, 108 aa, Homo sapiens
SYELTQPPSVSVSPGQTARITCSADALPKQYAYWYQQKPGQAPVLVIYKDSERPSGIPERFSGSSSGTTVTLTISGVQAEDEADYYCQSTDSSGSYVVFGGGTKLTVL

SEQ ID NO: 1598 - protein, 107 aa, Homo sapiens
DIQMTQSPSSLSASVGDRVTITCRASQNIASYLNWYQQKPGKAPKLLIYAASSLQSGVPSRFSGSGSGTDFTLTISSLQPEEFATYYCHQSYFTPQTFGQGTKLEIK

SEQ ID NO: 1599 - protein, 108 aa, Homo sapiens
EIVLTQSPATLALSVGERATLSCVASQRVSSDYIAWYQKKPGLAPRLLVYHGSAWATGSSARFSGSGSGTAFTLTISSLEPEDFAVYYCQQYGNSPFTFGPGTKVEFK

SEQ ID NO: 1600 - protein, 108 aa, Homo sapiens
EIVLTQSPGTLSLSPGERATLSCRASQSVSSSYLAWYQEKPGQAPRLLMYSASSRATGIPDRFSGSGSATDFTLTINRLEPEDFAVYYCQQYVEPPFTFGQGTKLEIK

SEQ ID NO: 1601 - protein, 110 aa, Homo sapiens
QSALTQPRSVSGSPGQSVTISCTGTSSDVGGYNYVSWYQQHPGKAPKLMIYDVSKRPSGVPDRFSGSKSGNTASLTVSGLQAEDEAEYYCSAYAGSNNLVFGGGTKLTVL

SEQ ID NO: 1602 - protein, 107 aa, Homo sapiens
EIVLTQSPGTLSLSPGERATLSCRAGQTVSSSYLAWYQHKPGQAPRLLIYGASSRATGIPDRFSGSGSGTDFTLTISRLEPEDFAVYYCQQYGSSYTFGQGTKLEIK

SEQ ID NO: 1603 - protein, 107 aa, Homo sapiens
DIQMTQSPSSLSASVGDRVTITCRASQSISSYLNWYQQKPGKAPKLLIYAASSLQSGVPSRFSGSGSGTDFTLTISSLQPEDYATYYCQQSYSTPGTFGQGTRLEIK

SEQ ID NO: 1604 - protein, 108 aa, Homo sapiens
EIVLTQSPGTLSLSPGERATLSCRASQSVSSSYLAWYQQKPGQAPRLLIYGASSRATGIPDRFSGSGSGTDFTLTISRLEPEDFAVYYCQQYGRSSGTFGQGTKVEIK

SEQ ID NO: 1605 - protein, 109 aa, Homo sapiens
EIVLTQSPGTLSLSPGERATLSCRASQSVSSSYLAWYQQKPGQAPRLLIYGASSRATGIPDRFSGSGSGTDFTLTISRLEPEDFAVYYCQQYGSSPLITFGQGTRLEIK

SEQ ID NO: 1606 - protein, 113 aa, Homo sapiens; identical to SEQ ID NO: 1403

SEQ ID NO: 1607 - protein, 109 aa, Homo sapiens
QTVVTQEPSLTVSPGGTVTLTCASSAGAVTSGYYPNWFQQKPGQAPRALIYSTANKHSWTPARFSGSLLGGKAALTLSGVQPEDEAEYYCLLYYGGAWVFGGGTKLTVL

SEQ ID NO: 1608 - protein, 107 aa, Homo sapiens
EIVLTQSPDFQSVTPKEKVTITCRASQNIGSSLHWYQQKPDQSPKVIIKYASQSFSGVPSRFSGSGSGTDFTLTINSLEAEDAATYYCHQSSSLPPTFGGGTKVEIK

SEQ ID NO: 1609 - protein, 108 aa, Homo sapiens
EIVLTQSPATLSLSPGERATLSCRASQSISSFLAWYQQKPGQAPRLLIYDASNRATGIPARFSGSGSGTDFTLTISSLEPEDFAVYYCQRRSNWPPFTFGPGTKVDIK

SEQ ID NO: 1610 - protein, 111 aa, Homo sapiens; identical to SEQ ID NO: 1272

SEQ ID NO: 1611 - protein, 108 aa, Homo sapiens; identical to SEQ ID NO: 1366

SEQ ID NO: 1612 - protein, 113 aa, Homo sapiens
DIVMTQSPDSLAVSLGERATINCKSSQSVLYSSNNKNYLAWYQQKPGQPPKLLIYWASTRESGVPDRFSGSGSGTDFTLTISSLQAEDVAVYYCQQYYSSPYTFGQGTKLEIK

SEQ ID NO: 1613 - protein, 108 aa, Homo sapiens
EIVLTQSPGTLSLSPGERATLSCRASQSVSSSYLGWYQQKPGQAPRLLIYGASSRATGIPDRFSGSGSGTDFTLTISRLESEDFALYYCQQYNNWWRTFGQGTKVEIK

SEQ ID NO: 1614 - protein, 109 aa, Homo sapiens
EIVLTQSPGTLSLSPGERATLSCRASQSVSSSYLAWYQQKRGQAPRLLIYGASSRATGIPDRFSGSGSGTDFTLTISRLEPEDFAVYYCQQYGSSPRLTFGGGTKVEIK

SEQ ID NO: 1615 - protein, 110 aa, Homo sapiens
QSVLTQPPSASGTPGQRVTISCSGSNSNIGSYTVNWYQQLPGTAPKLLIYDNNQRTSGVPDRLSGSKSGTSASLAISGLQSEDEANYYCAVWDDSLNGLVFGGGTKLTVL

SEQ ID NO: 1616 - protein, 111 aa, Homo sapiens
QSVLTQPPSVSGAPGQRVTISCTGSSSNIGAGYDVHWYQQLPGTAPKLLIFGNTNRPSGVPDRFSGSKSGTSTSLAITGLQAEDEADYYCQSYDSSLNGDVFGGGTKLTVL

SEQ ID NO: 1617 - protein, 109 aa, Homo sapiens
EIVLTQSPATLSLSPGERATLSCRASQSVSSYLAWYQQKPGQAPRLLIYDAYKRDTGIPARFSGSGSGTDFTLTISSLEPEDFAVYYCQQRSNWPLIFTFGPGTKVDIK

SEQ ID NO: 1618 - protein, 111 aa, Homo sapiens
QSVLTQPPSVSGVPGQRVTVSCTGSSSNIGAGFDVYWYQQFLGTAPKLLIYGNNNRPSGVPDRFSASKSGTSASLAITGLQAEDEADYYCQSYDSSLSGYVFGTGTKVTVL

SEQ ID NO: 1619 - protein, 108 aa, Homo sapiens
DIQMTQSPSSLSASVGDRVTITCRASQSISSYLNWYQQKPGKAPKLLIYDASSLQSGVPSRFSGSGSGTDFTLTISSLQPEDFATYYCQQSYSTPPITFGQGTRLEIK

SEQ ID NO: 1620 - protein, 108 aa, Homo sapiens
DIQMTQSPSSLSTSVGDRVTITCRASQSIRSYLNWYQQKPGKAPKLLIYVASSLQSGVPSRFSGSGSGTDFTLTISSLQPEDFATYYCQQSYSTPPWTFGQGTKVEIK

SEQ ID NO: 1621 - protein, 107 aa, Homo sapiens; identical to SEQ ID NO: 1367

SEQ ID NO: 1622 - protein, 110 aa, Homo sapiens
QSVLTQPPSASGTPGQRVTISCSGSNSNIGSYTVNWYQQLPGTAPKLLIFGNNQRPSGVPDRFSGSKSGTSASLAISGLQSEDEADYYCVAWDDSRNGLVFGGGAKLTVL

SEQ ID NO: 1623 - protein, 110 aa, Homo sapiens
SYELTQPPSVSVSPGQTARITCSTDALPNEYIYWYQQKPGQAPVLVIYKDSERPSGIPERFSGSSSGTTVTLTISGVQAEDEADYYCQSVDSSGTYPHVIFGGGTKLTVL

SEQ ID NO: 1624 - protein, 107 aa, Homo sapiens
DIQMTQSPSSLSASVGDRVTITCRASQSIISYLNWYHQKPGKAPKLLIYAASSLQSGVPSRFSGSGSGTDFTLTISSLQPEDFATYYCQQSYSTPYTFGQGTKLEIK

SEQ ID NO: 1625 - protein, 107 aa, Homo sapiens
DIQLTQSPSFLSASVGDRVTITCRASQGISSYLAWYQQKPGKAPKLLIYAASTLQSGVPSRFSGSGSGTEFTLTISSLQPEDFATYYCQQLNSYPLTFGGGTKVEIK

SEQ ID NO: 1626 - protein, 112 aa, Homo sapiens
QSALTQPASVSGSPGQSITISCTGTSSDVGGYNFVSWYQQHPGKAPKLIIYDVSNRPSGVSNRFSGSKSGNTASLTISGLQAEDEADYYCTSYTSSSTLNVVFGGGTKLTVL

SEQ ID NO: 1627 - protein, 110 aa, Homo sapiens
QSALTQPASVSGSPGQSITISCTGTSSDVGSYNLVSWYQQHPGKAPKLMIYEVSKRPSGVSNRFSGSKSGNTASLTISGLQAEDEADYYCCSYASSSIVVFGGGTKLTVL

SEQ ID NO: 1628 - protein, 108 aa, Homo sapiens
DIQMTQSPSSLSASVGDRVTITCRASQSISSYLNWYQQKPGKAPKLLLYAASSLQSGVPSRFSGSGSGTDFTLTISSLQPEDFATYYCQQSYSTPPWTFGQGTKVEIK

SEQ ID NO: 1629 - protein, 108 aa, Homo sapiens
DIQLTQSPSFLSASVGDRVTITCRASQGISSYLAWYQQKPGKAPKLLIYAASTLQSGVPSRFSGSGSGTEFTLTISSLQPEDFATYYCQQLNSYSFETFGPGTKVAIK

SEQ ID NO: 1630 - protein, 112 aa, Homo sapiens; identical to SEQ ID NO: 1381

SEQ ID NO: 1631 - protein, 107 aa, Homo sapiens
DIQMTQSPSTLSASIGDRVTITCRASQSISSWLAWYQQIPGKAPKLLIYKASSLESGVPSRFSGSGSGTEFTLTISSLQPDDFATYYCQQYNSYPYTFGQGTKLEIK

SEQ ID NO: 1632 - protein, 107 aa, Homo sapiens
DIQMTQSPSSLSASIGDRVTITCRASQNIRSYLNWYQHKPGKAPKLLIYAASTLQSGVPSRFSGSESGTDFTLTISSLQPEDFATYYCQQSSSSPITFGQGTKLEIK

SEQ ID NO: 1633 - protein, 107 aa, Homo sapiens; identical to SEQ ID NO: 1362

SEQ ID NO: 1634 - protein, 108 aa, Homo sapiens
SYELAQPPSVSVAPGETATIFCRATYIGRKNVQWYQQKPGQAPVLVVYDDSDRPSGIPGRFSGSNSGDTATLTISRIEAGDEAAYYCQVWDGINDRVVFGGGTKLTVL

SEQ ID NO: 1635 - protein, 107 aa, Homo sapiens; identical to SEQ ID NO: 1380

SEQ ID NO: 1636 - protein, 107 aa, Homo sapiens
DFQMTQSPSSLSASVGDRVTITCRASQSISTYLNWYQQKPGKAPNLLIFAASSLHSGVPSRFSGSGSGTDFTLSISSLQPEDFATYYCQQSYSSEWTFGQGTKVEIK

SEQ ID NO: 1637 - protein, 111 aa, Homo sapiens
QSLLTQPPSVSGAPGQRVTLSCAGATSNIGAGSDVHWYQQLPGTAPKLLIYYNTNRPSGVPDRFSGSKSATSASLVITGLQTEDEADYYCQSYDISLGGWVFGGGTKLTVL

SEQ ID NO: 1638 - protein, 108 aa, Homo sapiens
DIQMTQSPSSLSASVGDRVTITCRASQSVSIYLNWYQQKPGKAPKLLIYAASSLQSGVPSRFSGSGSGTDFTLTVSSLQPEDFATYYCQQSYSMPPITFGQGTRLEIK

SEQ ID NO: 1639 - protein, 111 aa, Homo sapiens
QSVLTQPPSASGTPGQRVTISCSGSSSNIGSNSLNWYQQLPGTAPKLLIYSNNQRPSGVPDRFSGSKSGTSASLAISGLQSEDEADYYCAAWDDSLNGSWVFGGGTKLTVL

SEQ ID NO: 1640 - protein, 110 aa, Homo sapiens
QSVLTQPPSASGTPGQRVTISCSGSRYNIGSNYVYWYQQLPGTAPRLLIYSNNQRPSGVPDRFSGSKSGTSASLAISGLRSEDEADYYCAAWDDSLSGLIFGGGTKLTVQ

SEQ ID NO: 1641 - protein, 110 aa, Homo sapiens
QSALTQPASVSGSPGQSITISCTGTSSDVGSYNLVSWYQQHPGKAPKLMIYEGSKRPSGVSNRFSGSKSGNTASLTISGLQAEDEADYYCCSYAGSSTWLFGGGTKLTVL

SEQ ID NO: 1642 - protein, 109 aa, Homo sapiens; identical to SEQ ID NO: 1359

SEQ ID NO: 1643 - protein, 111 aa, Homo sapiens
QSVLTQPPSVSGAPGQRVTISCTGSSSNIGAGYDVHWYQQLPETAPKLLIYANSNRPSGVPDRFSGSKSGTSASLAISGLQSEAEADYYCVAWDDSRNGLVFGGGAKLTVL

SEQ ID NO: 1644 - protein, 110 aa, Homo sapiens
QSVLTQPPSVSAAPGQKVTISCSGSSSNIGNNYVSWYQQLPGTAPKLLIYDNNERPSGIPDRFSGSKSGTSATLGITGLQTGDEADYYCGTWDSSLSAYVFGTGTKVTVL

SEQ ID NO: 1645 - protein, 109 aa, Homo sapiens; identical to SEQ ID NO: 1386

SEQ ID NO: 1646 - protein, 106 aa, Homo sapiens
SYELTQPPSVSVSPGQTASITCSGDKLGDKYACWYQQKPGQSPVLVIYQDTKRPSGIPERFSGSNSGNTATLTISGTQAMDEADYYCQAWGSSRGVFGGGTKLTVL

SEQ ID NO: 1647 - protein, 109 aa, Homo sapiens
SSELTQDPAVSVALGQTVRITCQGDSLRSYYASWYQQKPGQAPVVVIYGKNNRPSGIPDRFSGSSSGNKASLTITGAQAGDEADYYCNSRDNSGNLNWVFGGGTKLTVL

SEQ ID NO: 1648 - protein, 107 aa, Homo sapiens
DIQMTQSPSSLSASVGDRVTITCQASQDINNYLNWYQQKSGKAPKLLIYDASNLETGVPSRFSGSGSGTDFTFTINSLQPEDIATYYCQQYDNLPYTFGQGTKLEIK

SEQ ID NO: 1649 - protein, 106 aa, Homo sapiens
SYELTQPPSVSVSPGQTARITCSGDALPKQYAYWYQQKPGQAPVLVIYKDTERPSGIPERFSGSSSGTTVTLTISGVQAEDEADYYCQSADSSGSRFGGGTKLTVL

SEQ ID NO: 1650 - protein, 107 aa, Homo sapiens
EIVMTQSPATLSVSPGERATLSCRASQSVSSNLAWYQQKPGQAPRLLIYGASTRATVIPARFSGSGSGTEFTLTISSLQSEDFAVYYCQQYNNWPYTFGQGTKLEIK

SEQ ID NO: 1651 - protein, 108 aa, Homo sapiens; identical to SEQ ID NO: 1375

SEQ ID NO: 1652 - protein, 110 aa, Homo sapiens
QSVLTQPPSASGTPGQRVTISCSGSSSNIGSNTVNWYQQLPGTAPKLLIYNNNQRPSGVPDRLSGSKSGTSASLAISGLQSEDEADYYCATWDDSLNGPVFGGGTKLTVL

SEQ ID NO: 1653 - protein, 112 aa, Homo sapiens; identical to SEQ ID NO: 1361

SEQ ID NO: 1654 - protein, 108 aa, Homo sapiens
SYELTQPPSVSVSPGQTARITCSGDALPKQYAYWYHQKPGQAPVLVIYKDSERPSGIPERFSGSSSGTTVTLTISGVQAEDEADYYCQSADSSGTSVLFGGGTKLTVL

SEQ ID NO: 1655 - protein, 110 aa, Homo sapiens
QSALTQPASVSGSPGQSITISCTGTSSDVGSYNLVSWYQQHPGKAPKLMIYEGSKRPSGVSNRFSGSKSGNTASLTISGLQAEDEADYYCCSYARSSTRVFGGGTKLTVL

SEQ ID NO: 1656 - protein, 106 aa, Homo sapiens
SYELTQPPSVSVSPGQTARITCSGDAFPKQYGYWYQQKPGQAPVLVIYKDSERPSGIPERFSGSSSGTTVTLTISGVQAEDEADYYCQSADSRGAVFGSGTKVTVL

SEQ ID NO: 1657 - protein, 110 aa, Homo sapiens
QSVLTQPPSASGTPGQSVTISCSGSSSNIGNNKVNWYQQLPGTAPKVLIYNSNQRPSGVPDRFSGSKSGTSASLAISGLQSEDEADYYCAVWDDSLHSYVFGTETKVTVL

SEQ ID NO: 1658 - protein, 107 aa, Homo sapiens
DIQMTQSPSSLSASVGDRVTITCRASQSISRYLNWYQQKPGKAPKLLIYTASSLQSGVPSRFSGSGSGTDFTLTISSLQPEDFATYYCQQSYSTPRTFGQGTKVEIK

SEQ ID NO: 1659 - protein, 107 aa, Homo sapiens
DIQMTQSPSSLSASVGDRVTITCRASQSISNYLNWYQQKPGKAPKLLIYDASNLETGVPSRFSGSGSGTDFTFTISSLQPDDIATYYCQQYDNLPLAFGPGTKVDIK

SEQ ID NO: 1660 - protein, 107 aa, Homo sapiens; identical to SEQ ID NO: 1362

SEQ ID NO: 1661 - protein, 111 aa, Homo sapiens
QSVLTQPPSVSGAPGQRVTISCTGSSSNIGARYDVHWYQQLPGTAPKLLMYGNNNRPSGVPDRFSGSKSGTSVSLAITGLQAEDEADYYCQSYDSSLSGWVFGGGTKLTVL

SEQ ID NO: 1662 - protein, 107 aa, Homo sapiens
VIQMTQSPSSLSASVGDRVTITCQASQDINKYLNWYQQKPGKAPKLLIYDASNLETGVPSRFSGSGSGTDFTFTISSLQPEDIATYYCQQYANLPFTFGPGTKVDIK

SEQ ID NO: 1663 - protein, 107 aa, Homo sapiens
VIQMTQSPSSLSASVGDRVTITCQASQDINKYLNWYQQKPGKAPKLLIYDASNLETGVPSRFSGSGSGTDFTFTISSLQPEDIATYYCQQYDNLPRTFGQGTKLEIK

SEQ ID NO: 1664 - protein, 111 aa, Homo sapiens
QSVLTQPPSVSGAPGQRVTISCTGSSSNIGAGYDVHWYQQLPGTAPKLLIYGNSNRPSGVPDRFSGSKSGTSASLAISGLQAEDEADYSCQSYDSSLSGYVFGTGTKVTVL

SEQ ID NO: 1665 - protein, 111 aa, Homo sapiens; identical to SEQ ID NO: 1415

SEQ ID NO: 1666 - protein, 108 aa, Homo sapiens
DIQMTQSPSSLSASVGDRVTITCRASQSISSYLNWYQQKPGKAPKLLIYAASSLQSGVPSRFSGSGSGTDFTLTISSLQPEDFATYYCQQSYSNPSYTFGQGTKLEIK

SEQ ID NO: 1667 - protein, 110 aa, Homo sapiens
EIVLTQSPGTLSLSPGERATLSCRASQSVASSYLAWYQQKPGQAPRLLIYGASGRATGIPDRFSGSGSGTDFTLTISRLEPEDFAVYYCQQYGSSPPRYTFGQGTKLEIK

SEQ ID NO: 1668 - protein, 108 aa, Homo sapiens
DIQMTQSPSSLSASVGDRVTITCRASQSISSYLNWYQQRPGKAPKLLIYAASSLQSGVPSRFSGSGSGTDFTLTISTLQPEDFATYYCQQSYSTLLYTFGQGTKLEIK

SEQ ID NO: 1669 - protein, 112 aa, Homo sapiens; identical to SEQ ID NO: 1418

SEQ ID NO: 1670 - protein, 109 aa, Homo sapiens
SYVLTQPPSVSVAPGKTASITCEGNNIGSKSVHWYQQKPGQAPVLVIYYDSDRPSGIPERFSGSNSGNTATLTISRVEAGDEADYYCQVWDSSSDRLYVFGTGTKVTVL

SEQ ID NO: 1671 - protein, 108 aa, Homo sapiens
DIQLTQSPSFLSASVGDRVTITCRASQGISSYLAWYQQKPGKAPKLLIYAASTLQSGVPSRFSGSGSGTDFTLTISSLQPEDFATYYCQQSYSNPSYTFGQGTKLEIK

SEQ ID NO: 1672 - protein, 110 aa, Homo sapiens
QSALTQPASVSGSPGQSITISCTGTSSDVGSYNLVSWYQQHPGKAPKLMIYEGSKRPSGVSNRFSGSKSGITASLTISGLQAEDEADYYCCSYAGSSTWLFGGGTKLTVL

SEQ ID NO: 1673 - protein, 111 aa, Homo sapiens
NFMLTQPHSVSESPGKTVTISCTGSSGSIASNYVQWYQQRPGSAPTTVIYEDNQRPSGVPDRFSGSIDSSSNSASLTISGLKTEDEADYYCQSYDSTSRVVFGGGTKLTVL

SEQ ID NO: 1674 - protein, 108 aa, Homo sapiens
SYVLTQPPSVSVAPGRTARITCGGNNIGSKSVHWYQQKPGQAPVLVVYDDSDRPSGIPERFSGSKFGNTATLIISRVEAGDEADYSCQVWDSGSDHVVFGGGTKVTVL

SEQ ID NO: 1675 - protein, 107 aa, Homo sapiens
DIQMTQSPSSLSASVGDRVTITCRASQSISSYLNWYQQKPGKAPKVLIYAASTMQSGVPSRFRGSGSGTDFTLTISSLQLEDFATYYCQQSYSTPQTFGQGTKVEIK

SEQ ID NO: 1676 - protein, 110 aa, Homo sapiens
QSVLTQPPSVSEAPRQRVTISCSGGSSNIGNNAVNWYQQLPGKAPKLLIYYDDLLPSGVSDRFSGSKSGTSASLAISGLQSEDEADYYCASWDDSLIGPVFGGGTKLTVL

SEQ ID NO: 1677 - protein, 108 aa, Homo sapiens
DIQLTQSPSFLSASVGDRVTITCRASQGISTYLAWYQQKPGKAPKLLIYAASTLQSGVPSRFSGSGSGTEFTLTISSLQPEDFATYYCQQLNSYPGYTFGQGTKLEIK

SEQ ID NO: 1678 - protein, 110 aa, Homo sapiens
NLMLTQPHSVSESPGKTVTISCTGSSGSIASNYVQWYQQRPGSAPTTVIYEDNQRPSGVPDRFSGSIDSSSNSASLTISGLKTEDEADYYCQSYDSNNQVFGGGTKLTVL

SEQ ID NO: 1679 - protein, 110 aa, Homo sapiens
NFMLTQPHSVSESPGKTVTISCTRSSGSIASSYVQWYQQRPGSAPTTVIYEDNQRPSGVPDRFSGSIDSSSNSASLTISGLKTEDEADYYCQSYDSSDVVFGGGTKLTVL

SEQ ID NO: 1680 - protein, 109 aa, Homo sapiens
SYVLTQPPSVSVAPGKTARITCGGNNIGSKNVHWYQQKPGQAPVKVVYHDGDRPSGIPERFSGSNSGNTATLTINRVEAGDEADYSCQVWDSSSDHHVVFGGGTKLTVL

SEQ ID NO: 1681 - protein, 108 aa, Homo sapiens
SYELTQPPSVSVSPGQTARITCFGDALPKQYAYWYQQKPGQGPVLVIYKDSERPSGIPERFSGSTSGTTVTLTISGVQAEDEADYYCQSADSSGTYRVFGGGTKLTVL

SEQ ID NO: 1682 - protein, 107 aa, Homo sapiens
EIVMTQSPATLSVSPGERVTLSCRASQSVSSNLAWCQQKPGQAPRLLIYGASTRATGIPARFSGSGSGTEFTLTISSLQSEDFAVYYCQQYYNWPLTFGGGTKVEIK

SEQ ID NO: 1683 - protein, 108 aa, Homo sapiens
SYELTQPPSVSVSPGQTARITCSGDALPKQYAYWYQQKPGQAPVLVIYKDSERPSGIPERFSGSSSGTTVTLTISGVQAEDEADYYCQSADSSAAYVVFGGGTKLTVL

SEQ ID NO: 1684 - protein, 107 aa, Homo sapiens
SYELTQPPSVSVSPGQTARITCSGDALPKKYTYWYQQKSGQAPVVVIYEDSKRPSGIPERFSGSSSGTMATLTISGAQVEDEADYYCYSTDSSGKGVFGGGTKLTVL

SEQ ID NO: 1685 - protein, 109 aa, Homo sapiens
SYVLTQPPSVSVAPGKTARITCGGNNIGSKSVHWYQQKPGQAPVLVVYDDSDRPSGIPERFSGSNSGNTATLTISRVEAGDEADYYCQVWDSSSDPFYVFGTGTKVTVL

SEQ ID NO: 1686 - protein, 112 aa, Homo sapiens; identical to SEQ ID NO: 1372

SEQ ID NO: 1687 - protein, 113 aa, Homo sapiens; identical to SEQ ID NO: 1416

SEQ ID NO: 1688 - protein, 107 aa, Homo sapiens
DIQMTQSPSTLSASVGDRVTITCRASQSISSWLAWYQQKPGKAPKLLIYKASSLESGVPSRFSGSGSGTEFTLTISSLQPDDFATYYCQQYNSYSYTFGQGTKLEIK

SEQ ID NO: 1689 - protein, 109 aa, Homo sapiens
EIVMTQSPATLSVSPGERATLSCRASQSVSNNLAWYQQKPGQAPRLLIYGASTRATGIPVRFSGSGSGTEFTLTISSLQSEDFAVYYCQQYDDWPPEVTFGGGTKVEIK

SEQ ID NO: 1690 - protein, 111 aa, Homo sapiens
QSVLTQPPSVSGAPGQRVTISCTGSSSNIGSGSDVHWYQQLPGTAPKLLIYGNTNRPSGVPDRFSGSKSGTSASLAITGLQAEDEADYYCVAWDDSRNGLVFGGGAKLTVL

SEQ ID NO: 1691 - protein, 111 aa, Homo sapiens
QSVLTQPPSVSGVPGQRVTVSCTGSSSNIGAGFDVYWYQQFLGTAPKLLIYGNNNRPSGVPDRFSASKSGTSASLAITGLQAEDEADYYCQSFDIGRGGWIFGGGTKLTVL

SEQ ID NO: 1692 - protein, 107 aa, Homo sapiens
DIQMTQSPSSLSASVGDRVTITCRPSQSITTYLNWYQQKPGKAPRLLIYAVSSLQSGVPSRFSGSGSGTDFTLTISSLQPEDFATYYCQQSYSTPPTFGQGTRLEIK

SEQ ID NO: 1693 - protein, 111 aa, Homo sapiens; identical to SEQ ID NO: 1377

SEQ ID NO: 1694 - protein, 108 aa, Homo sapiens
QSALTQPASVSGSPGQSITISCTGTSSDVGSYNLVSWYQQHPGKAPKLKIYEGSKRPSGVSNRFSGSKSGNTASLTISGLQAEDEADYYCCSYAGSVLFGGGTKLTVL

SEQ ID NO: 1695 - protein, 107 aa, Homo sapiens
DIQMTQSPSSLSASAGDRVTITCRASQSIRYYLNWYQQKPGKAPKLLIYAASSLQSGVPSRFSGSGSGTDFTLTISSLQPEDFAAYYCQQSFSTPRTFGQGTKLEIK

SEQ ID NO: 1696 - protein, 110 aa, Homo sapiens; identical to SEQ ID NO: 1399

SEQ ID NO: 1697 - protein, 112 aa, Homo sapiens
DIVMTQSPLSLPVTPGEPASISCRSSQSLLHSNGYNFLDWYLQKPGQSPQLLIYLGSNRASGVPDRFSGSGSGTDFTLKISRVQAEDVGVYYCMQALQTPWTFGQGTKVEIK

SEQ ID NO: 1698 - protein, 108 aa, Homo sapiens
SSELTQDPAVSVALGQTVRITCQGDSLRRYYASWYQQKPGQAPVLVIYGKNNRPSGIPDRFSGSSSGNTASLTITGAQAEDEADYYCNSRDSSGNPRWFGGGTKLTVL

SEQ ID NO: 1699 - protein, 110 aa, Homo sapiens
EIVLTQSPGTLSLSPGERATLSCRASQSVSSSYLAWYQQKPGQAPRLLIYGASSRATGIPDRFSGSGSGTDFTLTISRLEPEDFAVYYCQQYGSSPPRYTFGQGTKLEIK

SEQ ID NO: 1700 - protein, 108 aa, Homo sapiens
SYELTQPPSVSVSPGQTARITCSTDALPNEYIYWYQQKPGQAPVLVIYKDSERPSGIPERFSGSSSGTTVTLTISGVQAEDEADYYCQSVDSSGTYRVFGGGTKLTVL

SEQ ID NO: 1701 - protein, 107 aa, Homo sapiens
DIQMTQSPSSLSASVGDRVTITCQASQDISNYLNWYQQKAGKAPKLLIYDASNLETGVPSRFSGSGSGTDFTFTISSLQPDDIATYYCQQYDNLPLAFGPGTKVDVK

SEQ ID NO: 1702 - protein, 112 aa, Homo sapiens
DVVMTQSPLSLPVTLGQPASISCRSSQSLVYSDGNTYLNWFQQRPGQSPRRLIYKVSSRDSGVPDRFSGSGSGTAFTLKISRVEAEDVGVYYCMQGTHWPYTFGQGTKLEIK

SEQ ID NO: 1703 - protein, 110 aa, Homo sapiens
QSALTQPRSVSGSPGQSVTISCTGTSSDVGGYTYVSWYQQHPGKAPKLMIYDVNKRPSGVPDRFSGSKSGITASLTISGLQAEDEADYYCCSYAGRYTWVFGGGTTLTVL

SEQ ID NO: 1704 - protein, 107 aa, Homo sapiens; identical to SEQ ID NO: 1365

SEQ ID NO: 1705 - protein, 106 aa, Homo sapiens
SYELTQPPSVSVSPGQTARITCSGDALPKQYAYWYQQKPGQAPVLVIYRDSERPSGIPERFSGSTSGTTVTLTISGVQAEDEADYYCQSADSTGWVFGGGTKLTVL

SEQ ID NO: 1706 - protein, 112 aa, Homo sapiens
DIVMTQTPLSLSVTPGQPASFSCKSSQSLLHSDGKTYLYWYLQKPGQSPQLLIYAVSNRFSGVPDRFSGSGSGTDFTLKISRVEAEDVGVYYCMQSIQLPYTFGQGTKLEIK

SEQ ID NO: 1707 - protein, 110 aa, Homo sapiens; identical to SEQ ID NO: 1468

SEQ ID NO: 1708 - protein, 109 aa, Homo sapiens
ETVLTQSPGTLSLSPGERATLSCRASQSVSSSYLAWYQQKPGQAPRLLIYGASSRATGIPDRFSGSGSGTDFTLTISRLEPEDFAVYYCQHYGSSRGWTFGQGTKVEIK

SEQ ID NO: 1709 - protein, 107 aa, Homo sapiens; identical to SEQ ID NO: 1682

SEQ ID NO: 1710 - protein, 107 aa, Homo sapiens; identical to SEQ ID NO: 1631

SEQ ID NO: 1711 - protein, 108 aa, Homo sapiens; identical to SEQ ID NO: 1375

SEQ ID NO: 1712 - protein, 107 aa, Homo sapiens; identical to SEQ ID NO: 1367

SEQ ID NO: 1713 - protein, 109 aa, Homo sapiens; identical to SEQ ID NO: 1404

SEQ ID NO: 1714 - protein, 110 aa, Homo sapiens; identical to SEQ ID NO: 1623

SEQ ID NO: 1715 - protein, 112 aa, Homo sapiens
QSVLTQPPSVSGAPGQRVTISCTGSSSNIGAGYDVHWYQQLPGTAPKLLIYGNTNRPSGVPDRFSGSKSGTSASLAITGLQAEDEADYYCQSYASSLSAHVVFGGGTKLTVL

SEQ ID NO: 1716 - protein, 112 aa, Homo sapiens
DIVMTQSPDSLAVSLGERATINCKSSQSVLYSSNNENYLAWYQQKPGQPPKLLIYWASTRESGVPDRFSGSGSGTDFTLTISSLQAEDVAVYYCQQYYSSYTFGQGTKVEIK

SEQ ID NO: 1717 - protein, 110 aa, Homo sapiens
EIVMTQSPGTLSLSPGERATLSCRASQSVSSSYLAWYQQKPGQAPRLLIYGASSRATGIPDRFSGSGSGTDFTLTISRLEPEDFAVYYCQQYGSSPPPFTFGPGTKVDIK

SEQ ID NO: 1718 - protein, 111 aa, Homo sapiens
NFMLTQPASVSGSPGQSITISCTGASSDVGGYNYVSWYQQHPGKAPKLMIYDVSNRPSGVSNRFSGSKSGNTASLTISGLQAEDEADYYCSSYTSSSTPVVFGGGTELTVL

SEQ ID NO: 1719 - protein, 107 aa, Homo sapiens
DIVMTQSPSSLSASVGDRVTITCRASQGISNYLAWYQQKPGKVPKLLIYAASTLQSGVPSRFSGSGSGTDFTLTISSLQPEDVATYYCQKYNSAPPAFGQGTKVDIK

SEQ ID NO: 1720 - protein, 107 aa, Homo sapiens
QSALTQPPSVSVSPGQTASIPCSGDKLGDIYACWYQQKPGQSPVLVIYQDTKRPSGIPERFSGSNSGNTATLTISGTQAMDEADYYCQAWGSTTAKVFGGGTKLTVP

SEQ ID NO: 1721 - protein, 109 aa, Homo sapiens
DIQLTQSPATLSLSPGERATLSCRASQSVSSYLAWYQQKPGQAPRLLIYDASNRATGIPARFSGSGSGTDFTLTISSLEPEDFAVYYCQQRSNWPPRVTFGGGTKVEIK

SEQ ID NO: 1722 - protein, 112 aa, Homo sapiens
QSVLTQPASVSGSPGQSITISCTGTSSDVGGYNYVSWYQQHPGKAPKLMIYDVSNRPSGVSNRFSGSKSGNTASLTISGLQAEDEADYYCSSYTSSSTRHWVFGGGTKLTVL

SEQ ID NO: 1723 - protein, 107 aa, Homo sapiens
DIQMTQSPSSLSASVRDRVTITCRASQSITSSLNWYQQKPGKAPKLLIYAASSLQSGVPSRFSGSGSGTDFTLTISSLQPEDFATYYCQQSYSTPYTFGQGTKVEIK

SEQ ID NO: 1724 - protein, 111 aa, Homo sapiens
NFMLTQPASVSGSPGQSITISCTGSSSDIAPYTFVSWYQQHSGTAPKLIIYDVRNRPSGISDRFSGSRSGNTASLSISGLQAEDEADYYCSAYTTTSTSWVFGGGTKLTVL

SEQ ID NO: 1725 - protein, 110 aa, Homo sapiens
QSALTQPPSASGSPGQSVTISCTGTSSDIGTYNYVSWYQQHPGKAPKLMIYEVTKRPSGVPDRFSGSKSGNTASLTVSGLQADDEGDYYCSSYVGNNNWVFGGGTKLTVL

SEQ ID NO: 1726 - protein, 107 aa, Homo sapiens
DIQLTQSPSSLSASVGDRVTITCQASQDISNYLNWYQQRPGKAPKLLIYDASNLETGVPSRFSGSGSGTDFTFTISSLQPEDIATYYCQQYDNPPLTFGGGTKLEIK

SEQ ID NO: 1727 - protein, 109 aa, Homo sapiens
QSALTQEPSLTVSPGGTVTLTCGSSTGAVTSGHYPYWFQQKPGQAPRTLIYDTSNKRSWTPARFSGSLLGGKAALTLSGAQPEDEAEYYCLLSYSGVWVFGGGTKLTVL

SEQ ID NO: 1728 - protein, 108 aa, Homo sapiens
EIVMTQSPATLSVSPGERATLSCRASQSVSSNLAWYQQKPGQAPRLLIYGASTRATGIPARFSGSGSGTEFTLTISSLQSEDFAVYYCQQYNNWPPWTFGQGTKVEIK

SEQ ID NO: 1729 - protein, 108 aa, Homo sapiens
NFMLTQPPSVSVAPGKTARITCGGNNIGSKSVHWYQQKPGQAPVLVIYYDSDRPSGIPERFSGSNSGNTATLTISRVEAGDEADYYCQVWDSSSDHWVFGGGTKLTVL

SEQ ID NO: 1730 - protein, 108 aa, Homo sapiens
EIVMTQSPATLSVSPGERATLSYRASQSVSSNLAWYQQKPGQAPRLLIYGASTRATGIPARFSGSGSGTEFTLTISSLQSEDFAVYYCQQYNNWPPGTFGQGTKLEIK

SEQ ID NO: 1731 - protein, 106 aa, Homo sapiens
SYELTQPPSVSVSPGQTASITCSGDKLGDKYACWYQQKPGQSPVLVTYQDNKRPSGIPERFSGSNSGNTATLTISGTQAMDEADYYCQAWDSSTAVFGGGTKLTVL

SEQ ID NO: 1732 - protein, 109 aa, Homo sapiens
SYELTQPPSVSVSPGQTARITCSGDALPKQYAYWYQQKPGQAPVLVIYKDSERPSGIPERFSGSSSGTTVTLTISGVQAEDEADYYCQSADSSGTYSVVFGGGTKLTVL

SEQ ID NO: 1733 - protein, 107 aa, Homo sapiens
DIQLTQSPSTLSASVGDRVTITCRASQSISSWLAWYQQKPGKAPKLLIYKASSLESGVPSRFSGSGSGTEFTLTISSLQPDDFATYYCQQYNSYSITFGPGTKVDIK

SEQ ID NO: 1734 - protein, 107 aa, Homo sapiens
DIVMTQSPSFLSASVGDRVTITCRASQGISSYLAWYQQKPGKAPKLLIYAASTLQSGVPSRFSGSGSGTEFTLTISSLQPEDFATYYCQQLHSYPLTFGGGTKVDIK

SEQ ID NO: 1735 - protein, 109 aa, Homo sapiens
DVVMTQSPGTLSLSPGERATLSCRASQNVSSSYLAWYQQKPGQAPRLLIYGASSRATGIPDRFSGSGSGTDFTLTISRLEPEDFAVYYCQQYGSSPLFTFGPGTKVEIK

SEQ ID NO: 1736 - protein, 108 aa, Homo sapiens
DIVMTQSPSSLSASVGDRVTITCRASQSISSYLNWYQQKPGKAPKLLIYAASSLQSGVPSRFSGSGSGTDFTLTISSLQPEDFATYYCQQSYSTPPVTFGGGTKVEIK

SEQ ID NO: 1737 - protein, 108 aa, Homo sapiens
DIVMTQSPSSLSASVGDRVTITCRASQSISNYLNWYQQKPGKAPKLLLYAASDLQSGVPSRFSGSGSGTDFTLTISSLQPEDFATYYCQQSYSTHMSTFGQGTKVDIK

SEQ ID NO: 1738 - protein, 108 aa, Homo sapiens
EIVMTQSPATLSLSPGERATLSCRASQSVSSYLAWYQQKPGQAPRLLIYDASNRATGIPARFSGSGSGTDFTLTISSLEPEDFAVYYCQQRSNWPQVTFGQGTRLEIK

SEQ ID NO: 1739 - protein, 107 aa, Homo sapiens
EIVMTQSPGTLSLSPGERATLSCRASQSVSSSYLAWYQQKPGQAPRLLIYGASSRATGIPDRFSGSGSGTDFTLTISRLEPEDFAVYYCQQYGSLYTFGQGTKVDIK

SEQ ID NO: 1740 - protein, 107 aa, Homo sapiens
DIQMTQSPSSLSASVGDRVTITCQASQDISNYLNWYQQKPGKAPKLLIYDASNLETGVPSRFSGSGSGTDFTFTISSLQPEDIATYYCQQYDNLPLTFGGGTKLEIK

SEQ ID NO: 1741 - protein, 108 aa, Homo sapiens
EIVLTQSPGTLSLSPGERATLSCRASQSVSSSYLAWYQQKPGQAPRLLIYGASSRATGIPDRFSGSWSGTDFTLTISRLEPEDFAVYYCQQYGSSPGTFGQGTKVDIK

SEQ ID NO: 1742 - protein, 108 aa, Homo sapiens
DIVMTQSPGTLSLSPGERATLSCRASQSVSSSYLAWYQQKPGQAPRLLIYGASSRATGIPDRFSGSGSGTDFTLTISRLEPEDFAVYYCQQYGSSLLTFGGGTKVEIK

SEQ ID NO: 1743 - protein, 109 aa, Homo sapiens
DIQLTQSPGTLSLSPGERATLSCRASQSVSSSYLAWYQQKPGQAPRLLIYGASSRATGIPDRFSGSGSGTDFTLTISRLEPEDFAVYYCQQYGSSPRLTFGGGTKVDIK

SEQ ID NO: 1744 - protein, 108 aa, Homo sapiens
EIVLTQSPATLSVSPGERATLSCRASQSVSSSLAWYQQKPGQAPRLLIYAASTRATGIPARFSGSGSGTEFTLTISSLQSEDFAVYYCQQYNNWPPWTFGQGTKLEIK

SEQ ID NO: 1745 - protein, 108 aa, Homo sapiens
EIVMTQSPGTLSLSPGERATLSCRASQSVSSSYLAWYQQKPGQAPRLLIYGASSRATGIPDRFSGSGSGTDFTLTISRLEPEDFAVYYCQQYGSSPGTFGQGTKVEIK

SEQ ID NO: 1746 - protein, 109 aa, Homo sapiens
EIVLTQSPATLSLSPGERATLSCRASQSVSSYLAWYQQEPGQAPRLLIYDASNRATGIPARFSGSGSGTDFTLTISSLEPEDFAVYYCQQRSNWPPMYTFGQGTKVEIK

SEQ ID NO: 1747 - protein, 112 aa, Homo sapiens
DIVMTQSPLSLPVTLGQPASISCRSSQSLVYSDGNTFLNWFQQRPGQSPRRLIYQVSNRDSGVPDRFSGSGSGTDFTLKISRVEAEDVGVYYCMQGTHWPRTFGQGTKLEIK

SEQ ID NO: 1748 - protein, 107 aa, Homo sapiens
DIQLTQSPSSLSASVGDRVTITCRASQGIRNDLGWYQQKPGKAPKRLIYAASSLQSGVPSRFSGSGSGTEFTLTISSLQPEDFATYYCLQHNSYPPLFGQGTKVEIK

SEQ ID NO: 1749 - protein, 108 aa, Homo sapiens
EIVMTQSPATLSLSPGERATLSCRASQSVSSYLAWYQQKPGQAPRLLIYDASNRATGIPARFSGSGSGTDFTLTISSLEPEDFAVYYCQQRSNWPPYTFGQGTKVEIK

SEQ ID NO: 1750 - protein, 109 aa, Homo sapiens
EIVLTQSPATLSLSPGERATLSCRASQSVSSYLAWYQQKPGQAPRLLIYDASNRATGIPARFSGSGSGTDFTLTISSLEPEDFAVYYCQQRSNWPPSITFGQGTRLEIK

SEQ ID NO: 1751 - protein, 107 aa, Homo sapiens
DVVMTQSPSSLSVSVGDRVTITCRASQGIRNDLGWYQQKPGKAPKRLIYAASSLQSGVPSRFSGSGSGTEFTLTISSLQPEDFATYYCLQHNSYLWTFGQGTKLEIK

SEQ ID NO: 1752 - protein, 107 aa, Homo sapiens; identical to SEQ ID NO: 1210

SEQ ID NO: 1753 - protein, 109 aa, Homo sapiens
EIVLTQSPGTLSLSPGERATLSCRASQSVSSSYLAWYQQKPGQAPRLLIYGASSRATGIPDRFSGSGSGTDFTLTISRLEPEDFAVYYCQQYGSSPGVTFGGGTKLEIK

SEQ ID NO: 1754 - protein, 107 aa, Homo sapiens
AIRMTQSPSSLSASVGDRVTITCRASQSISSYLNWYQQKPGKAPKLLIYAASSLQSGVPSRFSGSGSGTDFTLTISSLQPEDFATYYCQQSYSTPQTFGQGTKLEIK

SEQ ID NO: 1755 - protein, 110 aa, Homo sapiens
QPVLTQPASVSGSPGQSITISCTGTSSDVGGYNYVSWYQQHPGKAPKLMIYDVSNRPSGVSNRFSGSRSGDTASLTISGLQAEDEADYYCSSYTSSSTWVFGGGTKLTVL

SEQ ID NO: 1756 - protein, 107 aa, Homo sapiens
QLVLTQPPSVSVSPGQTASITCSGDKLGDKYACWYQQKPGQSPVLVIYQDSKRPSGIPERFSGSNSGNTATLTISGTQAMDEADYYCQAWDSSTAVVFGGGTKLTVL

SEQ ID NO: 1757 - protein, 108 aa, Homo sapiens
EIVMTQSPATLSVSPGERATLSCRASQSVSSNLAWYQHKPGQAPRLLIYGASTRATGIPARFSGSGSGTEFTLTISSLQSEDFAVYYCQQYNYWPLITFGQGTRLEIK

SEQ ID NO: 1758 - protein, 107 aa, Homo sapiens
DIVMTQSPSSLSASVGDRVTITCRASQSISSYLNWYQQKPGKAPKLLIYAASSLQSGVPSRFSGSGSGTDFTLTISSLQPEDFATYYCQQSYSTPRTFGQGTKVEIK

SEQ ID NO: 1759 - protein, 106 aa, Homo sapiens
QSVLTQPPSVSVAPGQTARITCGGNNIGSKSVHWYQQKPGQAPVLVVYDDSDRPSGIPERFSGSNSGNTATLTISRVEAGDEADYYCQVWASSSVVFGGGTKLTVL

SEQ ID NO: 1760 - protein, 112 aa, Homo sapiens
DIVMTQTPLSLSVTPGQPASISCKSGQSLLHSDGKTYLYWYLQKPGQPPQLLIYEVSNRFSGVPDRFSGSGSGTDFTLKISRVEAEDVGVYYCMQSIQLPPTFGQGTKVEIK

SEQ ID NO: 1761 - protein, 109 aa, Homo sapiens
DIVMTQSPATLSLSPGERATLSCRASQSVSSFLAWYQQKPGQAPRLLIYDASNRATGIPARFSGSGSGTDFTLTISSLEPEDFAVYYCQQRSNWPPRLTFGGGTKVDIK

SEQ ID NO: 1762 - protein, 107 aa, Homo sapiens
QSALTQPASVSGSPGQSITISCTGTSSDVGSYNLVSWYQQHPGKAPKLMIYDSSKRPSGVSNRFSGSKSGNTASLTISGLQAEDEADYYCCSYAGSVFGGGTKLTVL

SEQ ID NO: 1763 - protein, 113 aa, Homo sapiens
QTVVTQPASVSGSPGQSITISCTGTSSDVGGYNYVSWYQQHPGKAPKLMIYDVSNRPSGVSNRFSGSKSGNTASLTISGLQAEDEADYYCSSYTSSSTLGLYVFGTGTKVTVL

SEQ ID NO: 1764 - protein, 111 aa, Homo sapiens
QSVLTQPPSVSGAPGQRVTISCTGSSSNIGAGYDVHWYQQLPGTAPKVLIYDNNNRPSGVPDRFSGSKSGTSASLAITGLQAEDEADYYCQSYDSSLSGSVFGGGTKLTVL

SEQ ID NO: 1765 - protein, 107 aa, Homo sapiens
DIQLTQSPSSLSASVGDRVTITCRASQGIRNDLGWYQQKPGKAPKRLIYAASSLQSGVPSRFSGSGSGTEFTLTISSLQPEDFATYYCLQHNSYPLTFGGGTKVDIK

SEQ ID NO: 1766 - protein, 110 aa, Homo sapiens
QSALTQPASVSGSPGQSITISCTGTSSDVGSYNLVSWYQQHPGKAPKLMIYEVTKRPSGVSNRFSGSKSGNTASLTISGLQAEDEADYYCCSYAGSSTWVFGGGTKLTVL

SEQ ID NO: 1767 - protein, 110 aa, Homo sapiens
QSVLTQPASVSGSPGQSITISCTGTSSDVGSYNLVSWYQQHPGKAPKLMIYEASKRPSGISNRFSGSKSGNTASLTISGLQAEDEADYYCCSYAGSSTWVFGGGTKPTVL

SEQ ID NO: 1768 - protein, 108 aa, Homo sapiens
DIVMTQSPATLSVSPGERATLSCRASQSVSSNLAWYQQKPGQAPRLLIYGASTRATGIPARFSGSGSGTEFTLTISSLQPEDFAVYYCQQCYNWPPWTFGQGTRVEFK

SEQ ID NO: 1769 - protein, 107 aa, Homo sapiens
DIVMTQSPSSLSASVGDRVTITCRASQGIRNDLGWYQQKPGKAPKRLIYAASSLQSGVPSRFSGSGSGTEFTLTISSLQPEDFATYYCLQHNSYPLTFGGGTKLEIK

SEQ ID NO: 1770 - protein, 108 aa, Homo sapiens
AIRMTQSPSSLSASVGDRVTITCRASQSISSYLNWYQQKPGKAPKLLIYAASSLQSGVPSRFSGSGSGTDFTLTISSLQPEDFATYYCQQSYTTFIYTFGQGTKLEIK

SEQ ID NO: 1771 - protein, 108 aa, Homo sapiens
DIVMTQSPGTLSLSPGERATLSCRASQSVSSSYLAWYQQKPGQAPRLLIYGASSRATGIPDRFSGSGSGTDFTLTISRLEPEDFAVYYCQQYGSSPYTFGQGTKVEIK

SEQ ID NO: 1772 - protein, 108 aa, Homo sapiens
AIRMTQSPSSLSASVGDRVTITCQASQDISNYLNWYQQKPGKAPKLLIYDASNLETGVPSRFSGSGSGTDFTFTISSLQPEDIATYYCQQYDNLLSLTFGGGTKVEIK

SEQ ID NO: 1773 - protein, 114 aa, Homo sapiens
EIVLTQSPDSLAVSLGERATINCKSSQSVLYSSNNKNYLAWYQQKPGQPPKLLIYWASTRESGVPDRFSGSGSGTHFTLTISSLQAEDVAVYYCQQYYSTPPLTFGGGTKVDIK

SEQ ID NO: 1774 - protein, 106 aa, Homo sapiens
EIVMTQSPSSLSASVGDRVTITCRASQSMSSYLNWYQQKPGKAPKLLIYAASSLQSGVPSRFSGSGSGTDFTLTISSLQPEDFATYYCQQSYSTLTFGGGTKVEIK

SEQ ID NO: 1775 - protein, 108 aa, Homo sapiens
QTVVTQPPSVSVSPGQTARITCSGDALPKQYAYWYQQKPGQAPVLVIYKDSERPSGIPERFSGSSSGTTVTLTISGVQAEDEADYYCQSADSSGTYRVFGGGTKLTVL

SEQ ID NO: 1776 - protein, 108 aa, Homo sapiens
QPVLTQPPSVSVAPGQTARITCGGNNIGSKSVHWYQQKPGQAPVLVVYDDSDRPSGIPERFSGSNSGNTATLTISRVEAGDEADYYCQVWDSSSDHYVFGTGTKVTVL

SEQ ID NO: 1777 - protein, 112 aa, Homo sapiens
NFMLTQPPSASGTPGQRVTISCSGSSSNIGSNTVNWYQQLPGTAPKLLIYSNNQRPSGVPDRFSGSKSGTSASLAISGLQSEDEADYYCAAWDDSLNGPHWVFGGGTKLTVL

SEQ ID NO: 1778 - protein, 113 aa, Homo sapiens
DVVMTQSPDSLAVSLGERATINCKSSQSVLYSSNNKNYLAWYQQKPGQPPKLLIYWASTRESGVPDRFSGSGSGTDFTLTISSLQAEDVAVYYCQQYYSTPLTFGGGTKVDIK

SEQ ID NO: 1779 - protein, 108 aa, Homo sapiens
EIVLTQSPGTLSLSPGERATLSCRASQSVSSSYLAWYQQKPGQAPRLLIYGASSRATGIPDRFSGSGSGTDFTLTISRLEPEDFAVYYCQQYGSSPFTFGPGTKLEIK

SEQ ID NO: 1780 - protein, 107 aa, Homo sapiens
DIVMTQSPSSLSASVGDRVTITCRASQSISSYLNWYQQKPGKAPKLLIYAASSLQSGVPSRFSGSGSGTDFTLTISSLQPEDFATYYCQQSYSTPLTFGPGTKLEIK

SEQ ID NO: 1781 - protein, 106 aa, Homo sapiens
DIVMTQSPSSLSASVGDRVTITCRASQSMSSYLNWYQQKPGKAPKLLIYAASSLQSGVPSRFSGSGSGTDFTLTISSLQPEDFATYYCQQSYSTLTFGGGTKLEIK

SEQ ID NO: 1782 - protein, 113 aa, Homo sapiens
DIVMTQSPDSLAVSLGERATINCKSSQSVLYSSNNKNYLAWYQQKPGQPPKLLIYWASTRESGVPDRFSGSGSGTDFTLTISSLQAEDVAVYYCQQYYSTPITFGQGTRLEIK

SEQ ID NO: 1783 - protein, 113 aa, Homo sapiens
DIQLTQSPDSLAVSLGERATINCKSSQSVLYSSINKNYLAWYQQKPGQPPKLLIYWASTRESGVPDRFSGSGSGTDFTLTISSLQAEDVAVYYCQQYYSTPYTFGQGTKVEIK

SEQ ID NO: 1784 - protein, 110 aa, Homo sapiens
QSVLTQPPSASGTPGQRVTISCSGSSSNIGSNTVNWYQQLPGTAPKLLIYSNNQRPSGVPDRFSGSKSGTSASLAISGLQSEDEADYYCAAWDDSLNGPVFGGGTKLTVL

SEQ ID NO: 1785 - protein, 108 aa, Homo sapiens
EIVLTQSPGTLSLSPGERATLSCRASQSVSSIYLAWYQQKPGQAPRLLIYGASSRATGIPDRFSGSGSGTDFTLTISRLEPEDFAVYYCQQYAGSPWTFGQGTKVEIK

SEQ ID NO: 1786 - protein, 109 aa, Homo sapiens
EIVLTQSPATLSLSPGERATLSCRASQSVSSYLAWYQQKPGQAPRLLIYDASNRATGIPARFSGSGSGTDFTLTISSLEPEDFAVYYCQQRSNWPPIFTFGPGTKVDIK

SEQ ID NO: 1787 - protein, 112 aa, Homo sapiens
DVVMTQSPLSLPVTLGQPATISCRSSQSLVYSDGNTYVNWFQQRPGQSPRRLIYQVSIRASGVPDRFSGSGSGTDFALKISRVEAEDVGVYYCMQGTHWPVTFGQGTKVEIK

SEQ ID NO: 1788 - protein, 107 aa, Homo sapiens
DIQMTQSPSSLSASVGDRVTITCRASQNIDNYLNWYQQKPGKAPKLLIYAASRLHSGVPSRFSGSGSGTDFTLIISSLQPEDLATYYCQQSYSNPLTFGPGTKVDIR

SEQ ID NO: 1789 - protein, 110 aa, Homo sapiens
QSALTQPRSVSGSPGQSVTISCTGTSSDVGGYNYVSWYQQHPGKAPKLMIYDVSKRPSGVPDRFSGSKSGNTASLTISGLQAEDEADYYCCSYAGSYTWVFGGGTKLTVL

SEQ ID NO: 1790 - protein, 108 aa, Homo sapiens
EIVLTQSPGTLSLSPGERATLSCRASQSVSSSYLAWYQQKPGQAPRLLIYGASSRATGIPDRFSGSGSGTDFTLTISRLEPEDFAVYYCQQYGSSRGTFGQGTKVEIK

SEQ ID NO: 1791 - protein, 110 aa, Homo sapiens
QSALTQPASVSGSPGQSITISCTGTSSDVGSYNLVSWYQQHPGKAPKLMIYEGSKRPSGVSNRFSGSKSGNTASLTISGLQAEDEADYYCCSYAGSSTYVFGTGTKVTVL

SEQ ID NO: 1792 - protein, 111 aa, Homo sapiens
QSVLTQPPSVSAAPGQKVTISCSGSSSNIGNNYVSWYQQLPGTAPKLLIYDNNKRPSGIPDRFSGSKSGTSATLGITGLQTGDEADYYCGTWDSSLSAGPVFGGGTKLTVL

SEQ ID NO: 1793 - protein, 110 aa, Homo sapiens
EIVLTQSPGTLSLSPGERATLSCRASQSVSSSYLAWYQQKPGQAPRLLIYGASSRATGIPDRFSGSGSGTDFTLTISRLEPEDFAVYYCQQYGSSPPKYTFGQGTKLEIK

SEQ ID NO: 1794 - protein, 109 aa, Homo sapiens
EIVMTQSPATLSVSPGERATLSCRASQSVSSNLAWYQQKPGQAPRLLIYGASTRATGIPARFSGSGSGTEFTLTISSLQSEDFAVYYCQQYNNWPPSLTFGGGTKVEIK

SEQ ID NO: 1795 - protein, 107 aa, Homo sapiens; identical to SEQ ID NO: 1216

SEQ ID NO: 1796 - protein, 111 aa, Homo sapiens
QLVLTQSPSASASLGASVKLTCTLSSGHSSYAIAWHQQQPEKGPRYLMKLNSDGSHSKGDGIPDRFSGSSSGAERYLTISSLQSEDEADYYCQTWGTGIRVFGGGTKLTVL

SEQ ID NO: 1797 - protein, 108 aa, Homo sapiens
SYELTQPPSVSVSPGQTARITCSGDALPKQYAYWYQQKPGQAPVLVIYKDSERPSGIPERFSGSSSGTTVTLTISGVQAEDEADYYCQSADSSGTYVVFGGGTKLTVL

SEQ ID NO: 1798 - protein, 111 aa, Homo sapiens
QSVLTQPPSVSAAPGQKVTISCSGSSSNIGNNYVSWYQQLPGTAPKLLIYDNNKRPSGIPDRFSGSKSGTSATLGITGLQTGDEADYYCGTWDSSLSASYVFGTGTKVTVL

SEQ ID NO: 1799 - protein, 107 aa, Homo sapiens
EIVMTQSPATLSVSPGERATLSCRASQSVSSNLAWYQQKPGQAPRLLIYGASTRATGIPARFSGSGSGTEFTLTISSLQSEDFAVYYCQQYNNWPYTFGQGTKLEIK

SEQ ID NO: 1800 - protein, 107 aa, Homo sapiens
DIQMTQSPSSLSASVGDRVTITCRASQGIRNDLGWYQQKPGKAPKRLIYAASSLQSGVPSRFSGSGSGTEFTLTISSLQPEDFATYYCLQHNSYPFTFGPGTKVDIK

SEQ ID NO: 1801 - protein, 111 aa, Homo sapiens
QSALTQPASVSGSPGQSITISCTGTSSDVGGYNYVSWYQQHPGKAPKLMIYDVSNRPSGVSNRFSGSKSGNTASLTISGLQAEDEADYYCSSYTSSSTPYVFGTGTKVTVL

SEQ ID NO: 1802 - protein, 107 aa, Homo sapiens; identical to SEQ ID NO: 1788

SEQ ID NO: 1803 - protein, 108 aa, Homo sapiens
EIVLTQSPGTLSLSPGERATLSCRASQSVSSSYLAWYQQKPGQAPRLLIYGASSRATGIPDRFSGSGSGTDFTLTISRLEPEDFAVYYCQQYGSSPQTFGQGTKLEIK

SEQ ID NO: 1804 - protein, 111 aa, Homo sapiens; identical to SEQ ID NO: 1798

SEQ ID NO: 1805 - protein, 110 aa, Homo sapiens
QSVLTQPPSVSAAPGQKVTISCSGSSSNIGNNYVSWYQQLPGTAPKLLIYDNNKRPSGIPDRFSGSKSGTSATLGITGLQTGDEADYYCGTWDSSLSAVVFGGGTKLTVL

SEQ ID NO: 1806 - protein, 112 aa, Homo sapiens
QSVLTQPPSVSGAPGQRVTISCTGSSSNIGAGYDVHWYQQLPGTAPKLLIYGNSNRPSGVPDRFSGSKSGTSASLAITGLQAEDEADYYCQSYDSSLSGPVVFGGGTKLTVL

SEQ ID NO: 1807 - protein, 108 aa, Homo sapiens
SYELTQPHSVSVATAQMARITCGGNNIGSKAVHWYQQKPGQDPVLVIYSDSNRPSGIPERFSGSNPGNTATLTISRIEAGDEADYYCQVWDSSSDHVVFGGGTKLTVL

SEQ ID NO: 1808 - protein, 110 aa, Homo sapiens; identical to SEQ ID NO: 1784

SEQ ID NO: 1809 - protein, 108 aa, Homo sapiens
SYELTQPPSVSVSPGQTARITCSGDALPKQYAYWYQQKPGQAPVLVIYKDTERPSGIPERFSGSSSGTTVTLTISGVQAEDEADYYCQSADSSGTYMIFGTGTKVTVL

SEQ ID NO: 1810 - protein, 107 aa, Homo sapiens
DIQMTQSPSSLSASVGDRVTITCQASQDISNYLNWYQQKPGKAPKLLIYDASNLETGVPSRFSGSGSGTDFTFTISSLQPEDIATYYCQQYDNLPRFGPGTKVDIKR

SEQ ID NO: 1811 - protein, 108 aa, Homo sapiens
EIVLTQSPATLSLSPGERATLSCRASQSVSSYLAWYQQKPGQAPRLLIYDASNRATGIPARFSGSGSGTDFTLTISSLEPEDFAVYYCQQRSNWPPITFGQGTRLEIK

SEQ ID NO: 1812 - protein, 112 aa, Homo sapiens
DVVMTQSPLSLPVTLGQPASISCRSSQSLVYSDGNTYVNWFQQRPGQSPRRLIYKVSNRDSGVPDRFSGSGSGTDFALKISRVEAEDVGVYYCMQGTHWPVTFGQGTKVEIK

SEQ ID NO: 1813 - protein, 105 aa, Homo sapiens
DIQMTQSPSTLSASVGDRVTITCRASQSISSWLAWYQQKPGKAPKLLIYKASSLESGVPSRFSGSGSGTEFTLTISSLQPDDFATYYCQQYNSYTFGQGTKLEIK

SEQ ID NO: 1814 - protein, 107 aa, Homo sapiens; identical to SEQ ID NO: 1203

SEQ ID NO: 1815 - protein, 107 aa, Homo sapiens
EIVMTQSPATLSVSPGERATLSCRASQSVSSNLAWYQQKPGQAPRLLIYGASTRATGIPARFSGSGSGTEFTLTISSLQSEDFAVYYCQQYNNWPLTFGGGTKVEIK

SEQ ID NO: 1816 - protein, 107 aa, Homo sapiens
DIQMTQSPSSLSASVGDRVTITCRASQSISSYLNWYQQKPGKAPKFLIYAASSLQSGVPSRFSGSGSGTDFTLTISSLQPEDFATYYCQQTYITAFTFGPGTKVDIK

SEQ ID NO: 1817 - protein, 110 aa, Homo sapiens; identical to SEQ ID NO: 1261

SEQ ID NO: 1818 - protein, 108 aa, Homo sapiens
SYELTQPPSVSVSPGQTARITCSGDALPKQYAYWYQQKPGQAPVVVIYKDSERPSGIPERFSGSSSGTTVTLTISGVQAEDEADYYCQSADSSGTYVVFGGGTKLTVL

SEQ ID NO: 1819 - protein, 111 aa, Homo sapiens
QSVLTQPPSVSGAPGQRVTISCTGSSSNIGAGYDVHWYQQLPGTAPKLLIYGNSNRPSGVPDRFSGSKSGTSASLAITGLQAEDEADYYCQSYDSSLTLYVFGTGTKVTVL

SEQ ID NO: 1820 - protein, 112 aa, Homo sapiens
DVVMTQSPLSLPVTLGQPASISCRSSQSLVYSDGNTYVNWFQQRPGQSPRRLIYQVSIRASGVPDRFSGSGSGTDFALKISRVEAEDVGVYYCMQGTHWPVTFGQGTKVEIK

SEQ ID NO: 1821 - protein, 107 aa, Homo sapiens; identical to SEQ ID NO: 1203

SEQ ID NO: 1822 - protein, 112 aa, Homo sapiens
DVVMTQSPLSLPVTLGQPASISCRSSQSLVYSDGNTYLNWFQQRPGQSPRRLIYKVSNRDSGVPDKFSGSGSGTDFTLKISRVEAEDVGVYYCMQGTHWPPTFGQGTKVEIK

SEQ ID NO: 1823 - protein, 113 aa, Homo sapiens
DIVMTQSPDSLAVSLGERATINCKSSQNVLYSSNNKNYLAWYQQKPGQPPKLLIYWASTRESGVPDRFSGSGSGTDFTLTISSLQAEDVAVYYCQQYYITPYTFGQGTKLEIK

SEQ ID NO: 1824 - protein, 108 aa, Homo sapiens
SYELTQPPSVSVSPGQTARITCSGDALPKKYAYWYQQKSGQAPVLVIYEDSKRPSGIPERFSGSSSGTMATLTISGAQVEDEADYYCYSTDSSGNLYVFGTGTKVTVL

SEQ ID NO: 1825 - protein, 105 aa, Homo sapiens; identical to SEQ ID NO: 1813

SEQ ID NO: 1826 - protein, 108 aa, Homo sapiens
EIVLTQSPGTLSLSPGERATLSCRASQSVSSSYLAWYQQKPGQAPRLLIYGASSRATGIPDRFSGSGSGTDFTLTISRLEPEDFAVYYCQQYGSSPGTFGQGTRLEIK

SEQ ID NO: 1827 - protein, 110 aa, Homo sapiens
QSALTQPASVSGSPGQSITISCTGTSSDVGGYNYVSWYQQHPGKAPKLMIYDVSNRPSGVSNRFSGSKSGNTASLTISGLQAEDEADYYCSSYTSISTWVFGGGTKLTVL

SEQ ID NO: 1828 - protein, 108 aa, Homo sapiens
DIQMTQSPSSLSASVGDRVTITCRASQSISSYLNWYQQKPGKAPKLLIYAASSLQSGVPSRFSGSGSGTDFTLTISSLQPEDFATYYCQQSYSTLALTFGGGTKVEIK

SEQ ID NO: 1829 - protein, 110 aa, Homo sapiens
QSALTQPPSASGSPGQSVTISCTGTSSDVGGYNYVSWYQQHPGKAPKLMIYEVSKRPSGVPDRFSGSKSGNTASLTVSGLQAEDEADYYCSSYAGSNNLVFGGGTKLTVL

SEQ ID NO: 1830 - protein, 108 aa, Homo sapiens
EIVLTQSPGTLSLSPGERATLSCRASQSVSSSYLAWYQQKPGQAPRLLIYGASSRATGIPDRFSGSGSGTDFTLTISRLEPEDFAVYYCQQYGSSPGTFGQGTKVEIK

SEQ ID NO: 1831 - protein, 107 aa, Homo sapiens
DIQMTQSPSSLSASVGDRVTITCQASQDVSNYLNWYQQQPGKAPKLLIYDAFNLETGVPSRFSGSGSGTDFTFTISSLQPEDIATYYCQQYDNLPLTFGGGTKVEIK

SEQ ID NO: 1832 - protein, 107 aa, Homo sapiens; identical to SEQ ID NO: 1831

SEQ ID NO: 1833 - protein, 113 aa, Homo sapiens
DIQMTQSPLSLPVTPGEPASISCRSSQSLLDSDDGNTYLDWYLQKPGQSPQLLIYTLSYRASGVPDRFSGSGSGTDFTLKISRVEAEDVGVYYCMQRIEFPLTFGGGTKVEIK

SEQ ID NO: 1834 - protein, 109 aa, Homo sapiens
EIVLTQSPATLSLSPGERATLSCRASLSLSSYLAWYQQKPGQAPRLLIYDASNRATGIPARFSGSGSGTDFTLTISSLEPEDFAVYYCQQRSNWPPTWTFGQGTKAEIK

SEQ ID NO: 1835 - protein, 108 aa, Homo sapiens
EIVLTQSPGTLSLSPGERATLSCRASQSVSSSYLAWYQQKPGQAPRLLIYGASSRATGIPDRFSGSGSGTDFTLTISRVEPEDFAVYYCQQYGSSPWTFGQGTKVEIK

SEQ ID NO: 1836 - protein, 107 aa, Homo sapiens
DIQMTQSPSTVSASVGDRVTITCRASQSIDNWLAWYQEKPGKAPKVLIYKASSLESGVPSRFSGRGSGTEFTLTISSLQPGDFATYYCQHYHSFPLTFGGGTKVDIK

SEQ ID NO: 1837 - protein, 107 aa, Homo sapiens
EIVLTQSPGTLSLSPGERATLSCRASQSVSSYLAWYQQKPGQAPRLLIYGVSSRATGIPDRFSGSGSGTDFTLTISRLEPEDFAVYYCQQYGSSPRTFGQGTKVEIK

SEQ ID NO: 1838 - protein, 107 aa, Homo sapiens
EIVLTQSPGTLSLSPGERATLSCRASQSVSSYLAWYQQKPGQAPRLLISGASSRAAGIPDRFSGSGSGTDFTLTINRLEPEDFAVYYCQQYGSSPRTFGQGTKLEIK

SEQ ID NO: 1839 - protein, 107 aa, Homo sapiens
EIVLTQSPGTLSLSPGERATLSCRASQSVSSSYLAWYQQKPGQAPRLLIYGASSRATGIPDRFSGSGSGTDFTLTISRLEPEDFAVYYCQQYGRSPWTFGQGTKVEI

SEQ ID NO: 1840 - protein, 107 aa, Homo sapiens
DIQMTQSPSSLSASVGDRATITCRASQSISSYLNWYQEKPGKAPKLLIYAASSLQSGVPSRFSGSGSGTDFTLTISSLQPEDFATYYCQQSYSNPLTFGGGTKVEIK

SEQ ID NO: 1841 - protein, 112 aa, Homo sapiens
QPVLTQPPSVSGAPGQRITISCTGSSSNIGAGYDVHWYQQLPGTAPKLLIYGSSSRPSGVPDRFSGSKSGTSASLAITGLQAEDEADYYCQSYDSSLSVLYVFGTGTKVTVL

SEQ ID NO: 1842 - protein, 108 aa, Homo sapiens
DIVLTQTPATLSVSPGEGATLSCRASQSVRSNLAWFQQRPGQVPRLLIYDASTRATGVPARFTGSGSGTYFTLTISSLQSEDFAVYYCQQYNSWPPLTFGGGTKLEIK

SEQ ID NO: 1843 - protein, 106 aa, Homo sapiens
EIVMTQSPATLSVSPGETATLSCRASQSVGRFMGWYQQKPGQAPRLLIFDASNRVTGVPDRFRGSGSGTDFILTINSLEPEDSASYYCQRRGDGYNFGQGTKVEIK

SEQ ID NO: 1844 - protein, 112 aa, Homo sapiens
ETTLTQSPLSLPVTLGQPASISCRSSQGLVHSDGNTYLNWFQQRPGQSPRRLIYKVSNRDSGVPDRFSGSGSGTDFTLKISRVEAEDIGVYYCMQGTEWPRTFGQGTKVEIK

SEQ ID NO: 1845 - protein, 112 aa, Homo sapiens
DIRVTQSPLSLPVTLGQPASISCRSSQRIVHTDGNTYLNWFLQRPGQSPRRLIYKVSNRDSGVPDRFSGSGSGTDFTLKISRVEAEDVGIYYCMQGTEWPRTFGQGTKVDIK

SEQ ID NO: 1846 - protein, 107 aa, Homo sapiens
EIVMTQSPSSLSASVGDRVTITCRAGHTISTYLNWYQQKPGKAPKILISGASSLQSGVPSRFSGSGSGTDFTLTIGSLQPEDFATYYCQQSYSTPYTFGQGTKVDIK

SEQ ID NO: 1847 - protein, 110 aa, Homo sapiens
QPVLTQPASVSGSPGQSSTLSCSGTSSDVGSYDLVSWYQQHPGKAPKLMIYEGTKRPSGVSDRFSGSTSGNTASLTISGLQAEDEANYYCCSYAGSGTWIFGGGTKLTVL

SEQ ID NO: 1848 - protein, 108 aa, Homo sapiens
EIVLTQSPGTLSLSPGDRVTLFCRASQNIANNHLAWYQQKPGQAPRVLIYGASTTATDIPDRFSGRVSGTDFTLTISRLDPEDFAVYYCHQYGSSPWTFGQGTKLEIK

SEQ ID NO: 1849 - protein, 106 aa, Homo sapiens
ETTLTQSPATLSVSPGETATLSCRASQSVGRFMGWYQQKPGQAPRLLIFDASNRVTGVPDRFRGSGSGTDFILTINSLEPEDSASYYCQRRGDGYNFGQGTKVEIK

SEQ ID NO: 1850 - protein, 112 aa, Homo sapiens
DIRMTQSPLSLPVDLGQSASISCRSSQRVVHTNGNTYLHWFHQRPGQAPRRLIYKVSNRESGVPDRFSGSGSGTDFTLRISRVEAEDVGVYYCMQATDWPRTFGQGTKLEIK

SEQ ID NO: 1851 - protein, 112 aa, Homo sapiens
DIVMTQSPLSLSVTLGQAASISCTCSQTAVHSDGNTYLNWFHQRPGQSPRRLIYKVSNRDSGVPDRFSGSGSGTDFTLKINRVEAEDVGIYYCMQTTDWPRTFGQGTKVEIK

SEQ ID NO: 1852 - protein, 112 aa, Homo sapiens
ETTLTQSPVTLPVTLGQPASISCTSSRWLVHTNGNTYLNWFHQRPGQSPRRLIYQVSNRDSGVPDRFSGSGSGTDFTLQISRVEAEDVGVYYCMQGTEWPRTFGQGTKLEIK

SEQ ID NO: 1853 - protein, 107 aa, Homo sapiens
EIVLTQSPSSLSASVGDRVTITCQASQDIRKCLNWYQHIPGKAPKLLIHDASSLESGVPSRFSGSGSGTDFSFTINSLHPEDIATYYCQQFEDLPITFGQGTRLEIK

SEQ ID NO: 1854 - protein, 113 aa, Homo sapiens
DIVMTQSPDSLAVSLGERATINCKSSQSVLYSSNNKNYLAWYQQKPGQPPKLLIYWASTRESGVPDRFSGSGSGTDFTLTISSLQAEDVAVYYCQQYYSTPYTFGQGTKVEIK

SEQ ID NO: 1855 - protein, 109 aa, Homo sapiens
DIVVTQSPGTLSLSPGERAALSCRASQSVGNNYLAWYQQKPGQAPRLLIYGATSRATGIPDRFSGSGSGTDFTLTISRLEPEDFAVYYCQQYGTSPVYTFGQGTKVEIK

SEQ ID NO: 1856 - protein, 110 aa, Homo sapiens
QPVLTQPPSVSAAPGQKVTISCSGSSSNIENNYVSWYQQLPGAAPKLLIYDNNKRPSGIPDRFSGSKSGTSATLGITGLQTGDEADYYCGTWDFSLSAGVFGGGTKLTVL

SEQ ID NO: 1857 - protein, 112 aa, Homo sapiens
ETTLTQSPLSLPVTLGQPASISCRSSQGLVHTNGNLYLNWFHQRPGQSPRRLIYQVSNRDSGVPDRFSGSGSGTDFTLRISRVEAEDVGIYYCMQGTEWPRTFGQGTKVEIK

SEQ ID NO: 1858 - protein, 106 aa, Homo sapiens
DIQLTQSPSTLSASVGDSVTITCRASQSISSWLAWYQQKPGKAPKLLIYKASSLETGVPSRFSGSGSGTEFTLTISSLQPDDFATYYCQQYKSPLSFGGGTKVEIK

SEQ ID NO: 1859 - protein, 108 aa, Homo sapiens
DIQVTQSPATLSLSPGERATLSCRASQSVSSYLAWYQQKPGQAPRLLIYDASKRATGIPARFSGSGSGTDFTLTISSLEPEDFAVYYCQQRSDWHPITFGQGTRLEIK

SEQ ID NO: 1860 - protein, 106 aa, Homo sapiens
DIQVTQSPSSLSASVGDRVTITCRASQSISSSLNWYQQKPGKAPTLLIYTASNLQSGVPSRFSGSGSGTDFTLTITSLQPEDFATYYCQQSYSTPGFGPGTKVDIK

SEQ ID NO: 1861 - protein, 109 aa, Homo sapiens
EIVMTQSPATLSLSPGERATLSCRASQSVSIYLAWYQQKPGQAPRLLIYDASNRATGVPARFSGSGSGTDFTLTINNLEPEDFAIYYCQQRAKWPPRVTFGPGTKVDIK

SEQ ID NO: 1862 - protein, 109 aa, Homo sapiens
DIVLTQSPATLSLSPGERATLSCRASQSVSIYLAWYQQKPGQAPRLLIYDASNRATGIPARFSGSGSGTDFTLTINNLEPEDFAIYYCQQRAKWPPRVIFGPGTKVEIK

SEQ ID NO: 1863 - protein, 108 aa, Homo sapiens
SYELTQPPSVSVSPGQTARITCSGDALPRRYAYWYQQRSGQAPVLVIYEDNKRPSGIPERFSAFSSGTMATLTISGAQVEDEADYYCYSTDSTANYKVFGGGTKLTVL

SEQ ID NO: 1864 - protein, 112 aa, Homo sapiens
ETTLTQSPLSLPVTLGQPASISCRSSQGLVHSNGNTYVNWFHQRPGQSPRRLIYEVSNRDSGVPDRFSGSGSGTDFTLKISRVEAEDIGVYYCMQGTEWPRTFGQGTKVDIK

SEQ ID NO: 1865 - protein, 112 aa, Homo sapiens
QSVLIQPASVSGSPGQSITISCTGSSSDVGSYNLVSWYQQHPGKAPKLMIYEGYKRPSGVSNRFSGSKSGNTASLTISGLQAEDEADYYCCSYAGSSAVVVVFGGGTKLTVL

SEQ ID NO: 1866 - protein, 113 aa, Homo sapiens
DIRVTQSPDSLAVSLGERATINCRTSQSVLYSSNNKNYLGWYQQKPGQPPKLLIYWASTRESGVPDRFSGSGSGTDFTLTISSLQAEDVAVYYCQQYYSTPYTFGQGTKVDIK

SEQ ID NO: 1867 - protein, 108 aa, Homo sapiens
EIVLTQSPATLSLSPGERATLSCRASQSVSTYLAWYQQKPGQAPRLLIYDASNRATGIPARFSGSGSGTDFTLTISSLEPEDFALYYCLQRSDWHPITFGQGTRLEIK

SEQ ID NO: 1868 - protein, 109 aa, Homo sapiens
DIQLTQSPATLSLSPGERATLSCRANQSVSNFLAWYQQKPGQAPRHLIYDASNRATGIPARFSGSGSGTDFTLTISSLEPEDFAVYYCQQRSNWPPRLTFGGGTKVEIK

SEQ ID NO: 1869 - protein, 107 aa, Homo sapiens
DIVMTQTPGTLSVSPGERATLSCRASQIINRSQLGWYQHKPGQPPRLLIFDSSKRATGTPDRFSASGSETDFTLTISGVEPEDSGVYYCLQYSLATTFGPGTKVEIK

SEQ ID NO: 1870 - protein, 112 aa, Homo sapiens
QPVLTQSSSASASLGSSVKLTCTLSSGHSSYILAWHQQQPGKAPRFLMKFEVGGRYNKGSGVPDRFSGSSSGADRYLTISNLQSEDEADYYCETWDSNLKGVFGGGTKVTVL

SEQ ID NO: 1871 - protein, 112 aa, Homo sapiens
QPVLTQSSSASASLGSSVKLTCTLRSGHSSYIIAWHQQQPGKAPRFLMKVGHSGSYNKGSGVPDRFSGSRSGADHYLTISNLQPDDEADYYCEAWDNNNLGVFSGGTKVTVL

SEQ ID NO: 1872 - protein, 107 aa, Homo sapiens
DIQLTQSPSAMSASVGDRVTITCRASQGINDNLAWFQQKPGKVPKRLIYAASNLQNGVPSRFSGSGSGTEFTLTISSLQPEDFATYYCLQHNSYPLTFGGGTKLEIK

SEQ ID NO: 1873 - protein, 113 aa, Homo sapiens
DIRMTQSPLSLPVTPGEPASISCRSSQSLLHSNGYNYLDWYLQKPGQSPQLLIYLGSNRASGVPDRFSGSGSGTDFTLKISRVEAEDVGVYYCMQALQTPGVTFGGGTKVDIK

SEQ ID NO: 1874 - protein, 110 aa, Homo sapiens
QPVLTQPPSASGTPGQRVTISCSGSYSNIGTNPANWYQQLPGTAPKLLIYNNDQRPSGVPDRFSGSKSGTSASLAISGLQSEDETDYYCATWDDSLNGVVFGGGTKLTVL

SEQ ID NO: 1875 - protein, 112 aa, Homo sapiens
DIRMTQSPLSLPVTRGQPASISCRSSHNVVHSDGKTYLNWFHQRPGQAPRRLIYQVSKRDSGVPDRFSGSGSGSDFTLTISRVEAEDVGVYYCMQGTDWPRSFGGGTKVEIK

SEQ ID NO: 1876 - protein, 107 aa, Homo sapiens
EIVLTQSPSSLSASVGDRVTITCRASRSISSYLNWYQQKPGKAPNLLIYDASTLQSGVPSRFSGSGSGTDFSLTISSLQPEDFATYYCLHTYTTPRTFGQGTKVEIK

SEQ ID NO: 1877 - protein, 108 aa, Homo sapiens
EIVLTQSPATLSVSPGERITLSCRASHSVSSNLAWYQQKPGQVPRLLIYGASARATGIPARFSGSGSGTEFTLTISSLQSEDFAVYYCQQYNYWPPLTFGGGTKVEIK

SEQ ID NO: 1878 - protein, 107 aa, Homo sapiens
DIQMTQSPSSLSASVGDRVTITCRASQSISTYLNWYQQKTGKAPELLIYVASSLQSGVPSRFSGSGSGTDFTLTISSLQPEDFATYYCQQSYRFPITFGQGTRLEIK

SEQ ID NO: 1879 - protein, 108 aa, Homo sapiens
EIVLTQSPATLSLSPGERATLSCRASQSVGTYLAWYQQKHGQAPRLLISDVSKRATGIPARFSGSGSGTDFTLTITSLEPEDFAVYYCQQRTNWPGATFGPGTKVDIK

SEQ ID NO: 1880 - protein, 111 aa, Homo sapiens
QPVLTQSPSASASLGGSVKLTCTLTSGHSTYAIAWHQQQPEKGPRFLMKLNSDGSHNKGDGIPDRFSGSSSGAERYLTISSLQSEDEADYYCHTWGTDIQVFGGGTKLTVL

SEQ ID NO: 1881 - protein, 110 aa, Homo sapiens
NFMLTQPHSVSESPGKTVTISCTRSSGSIANNYVQWLQQRPGSSPTTIIYEDNQRPSGVPDRFSGSIDASSNSASLTISGLKTEDEADYYCQSYDSSSQVFGGGTKVTVL

SEQ ID NO: 1882 - protein, 108 aa, Homo sapiens
DIVLTQSPATLSVSPGERITLSCRASHSVSSNLAWYQQKPGQVPRLLIYGASARATGIPARFSGSGSGTEFTLTISSLQSEDFAVYYCQQYNYWPPLTFGGGTKVEIK

SEQ ID NO: 1883 - protein, 112 aa, Homo sapiens
ETTLTQSPLSLSVTLGQAASISCRPNLGLMHTDGNTYLNWFHQRPGQSPRRLIYKVSNRDSGVPDRFAGSGSGTHFTLEISGVEADDVGVYYCMQGTEWPRTFGQGTKLEIK

SEQ ID NO: 1884 - protein, 106 aa, Homo sapiens
DIRMTQSPSTLSASVGDRVTITCRASQTIGSWLAWYQQKPGKAPNLLIYKASSLESGVPSRFSGSGSGTEFTLTISSLQPDDFATYYCQQYNSLYTFGQGTKLEIK

SEQ ID NO: 1885 - protein, 108 aa, Homo sapiens
ETTLTQSPGTLSVSPGERATLSCRASQSVISNLAWYQQKPGQAPRLLIYGASTRATGVPARFSGSGSGTEFTLTIASLQSEDFAVYYCQQYHHWPPYTFGQGTKVDIK

SEQ ID NO: 1886 - protein, 114 aa, Homo sapiens
EIVLTQSPDSLAVSLGERATINCKSSQSVLYSSNNENCLAWYQQKPGQPPKLLIYWASTRESGVPDRFSGSGSGTDFTLTISSLQAEDVAVYYCQQYCSTPPYTFGQGTKVDIK

SEQ ID NO: 1887 - protein, 112 aa, Homo sapiens
EIVMTQSPLSLPVSLGQPASISCRSSQSVIHTDGNTYLNWYHQRPGQSPRRLIYKVSNRDSGVPDRFSGSGSVTDFTLKISRVEAEDVGVYYCMQGTEWPRTFGQGTKVEIK

SEQ ID NO: 1888 - protein, 112 aa, Homo sapiens
DIVMTQSPLSLPVSRGQSASISCRSSHSVVHSDGKTYVNWFHQRPGQAPRRLIYQVSKRDSGVPDRFSGSGSGFDFTLKISRVEAEDVGVYFCMQGTDWPRSFGGGTKVDIK

SEQ ID NO: 1889 - protein, 108 aa, Homo sapiens
DIVMTQSPSSLSASVGDRVTITCRASQSINIYLNWYQQKPGKAPKLLIYAASSLQSGVPSRFSGSGSGTDFTLTISSLQPEDFATYYCQQSYSTPLITFGQGTRLEIK

SEQ ID NO: 1890 - protein, 112 aa, Homo sapiens
DIRLTQSPLSLPVTLGQAASISCKSSHFIVHTDGNTYLNWFHQRPGQSPRRLIYKVSNRDSGVPDRFSGSGSGTDFTLEISGVEAEDVGVYYCMQGTEWPRTFGQGTKVDIK

SEQ ID NO: 1891 - protein, 112 aa, Homo sapiens
ETTLTQSPLFLPVTLGQPASISCTSSVHVVHSDGNTYLNWFQQRPGQSPRRLIYKVSNRDSGVPDRFSGSGSGTYFTLKISRVEAEDVGVYYCMQGTDWPRTFGQGTKVDIK

SEQ ID NO: 1892 - protein, 106 aa, Homo sapiens
ETTLTQSPATLSLSPGERATLSCRASQSINDYLGWYQHRPGQAPRLLIHDASTRAPGIPVRFSGSGSGTDFTLTISSLEPEDSAVYYCQQRFSWYNFGPGTKVEIK

SEQ ID NO: 1893 - protein, 111 aa, Homo sapiens
QSVLTQPASVSGSPGQSITISCAVTSSDVGSYNLVSWHQQHPGKAPKLMIYEVNKRPSGVSNRFSGSKSGNTASLTISGLQAEDEAVYYCCSYGGRSTSVVFGGGTKLTVL

SEQ ID NO: 1894 - protein, 106 aa, Homo sapiens
DIRLTQSPATLSLSPGERATLSCRASQSINDYLGWYQHRPGQAPRLLIHDASTRAPGIPVRFSGSGSGTDFTLTISSLEPEDSAVYYCQQRFSWYNFGPGTKLEIK

SEQ ID NO: 1895 - protein, 110 aa, Homo sapiens
QPVLTQPASVSGSPGQSITISCTGTTSDVGGYDYVSWYQQRPGKAPKLIIYDVINRPSGVSNRFSGSKSGNTASLTISGLQADDETDYYCSSYTSGGTLVFGTGTKLTVL

SEQ ID NO: 1896 - protein, 112 aa, Homo sapiens
DIQMTQSPLSLPVGLGQSASISCRSSQWVVHTDGNTYLNWFHQRPGQSPRRLIYKVSNRDSGVPDRFSGSGSGTDFTLRISRVEAEDVGVYYCMQATEWPRTFGQGTKVEIK

SEQ ID NO: 1897 - protein, 112 aa, Homo sapiens
DIRLTQSPLSLPVTLGQPASISCRSSQRIVHTDGNTYLNWFLQRPGQSPRRLIYKVSNRDSGVPDRFSGSGSGTDFTLKISRVEAEDVGIYYCMQGTEWPRTFGQGTKVDIK

SEQ ID NO: 1898 - protein, 112 aa, Homo sapiens
DIQLTQSPLSLPVTLGQPASISCRSSQRIVHTDGNTYLNWFLQRPGQSPRRLIYKVSNRDSGVPDRFSGSGSGTDFTLKISRVEAEDVGIYYCMQGTEWPRTFGQGTKVEIK

SEQ ID NO: 1899 - protein, 113 aa, Homo sapiens
ETTLTQSPLSLSVTLGQSASISCRASQTVVHSVDGNTYLNWFHQRPGQSPRRLIYKVSNRDSGVPDRFSGSGSGTDFTLRISRVEAEDIGIYYCMQGTDWPRTFGQGTKVEIK

SEQ ID NO: 1900 - protein, 112 aa, Homo sapiens
DIVMTQSPLSLPVTLGQPASISCRSSQRIVHTDGNTYLNWFLQRPGQSPRRLIYKVSNRDSGVPDRFSGSGSGTDFTLKISRVEAEDVGIYYCMQGTEWPRTFGQGTKVEIK

SEQ ID NO: 1901 - protein, 112 aa, Homo sapiens
DIRMTQSPLSLPVTLGQPASISCRSSQFVVHTDGNTYLNWFQQRPGQSPRRLIYKVSNRDSGVPDRFSGSGSGTDFTLKISRVEAEDVGVYYCMQATEWPRTFGQGTKVDIK

SEQ ID NO: 1902 - protein, 108 aa, Homo sapiens
SYVLTQPPSVSVSPGQTARITCSADGLPKQYSYWYQQKPGQAPVMVIYKDTERPSGIPERFSGSSSGTTATLTISGVQAEDEADYYCQSADSNDSSPVFGGGTQLTVL

SEQ ID NO: 1903 - protein, 107 aa, Homo sapiens
ETTLTQSPATLSLSPGEGATLSCRASQSVSSSLAWYQQKPGQAPRLLIYDASNRATGIPARFSGSGSGTDYTLTISSLEPEDFAVYYCHQRSNWPYTFGQGTKVEIK

SEQ ID NO: 1904 - protein, 107 aa, Homo sapiens
DIVLTQTPSSLSASVGDRVTITCRASQTIATYLSWYQQKPGKAPKLLIYAVSSLQSGVPSRFSGSGSGTDFTLTIGSLQPEDFATYYCQQSYSIPWTFGQGTKVDIK

SEQ ID NO: 1905 - protein, 108 aa, Homo sapiens
EIVMTQSPSSLSASVGDRVTITCRASQSISYYLNWYQQKPGKAPKLLIYAASSLQSGVPSRFSGSGSGTDFILTISSLQPEDIATYYCQHSYSSPPLTFGGGTKVEIK

SEQ ID NO: 1906 - protein, 112 aa, Homo sapiens
ETTLTQSPLSLPVTLGQPASISCRSSQIVVHSDGNTYLNWFHQRPGQSPRRLIYKVSNRDSGVPDRFSGSGSGTDFTLKISRVEAEDIGVYYCMQGTDWPRTFGQGTKVDIK

SEQ ID NO: 1907 - protein, 112 aa, Homo sapiens
DIRLTQSPLSLSVTLGQAASISCTCSQTAVHSDGNTYLNWFHQRPGQSPRRLIYKVSNRDSGVPDRFSGSGSGTDFTLKISRVEAEDVGIYYCMQTTDWPRTFGQGTKVEIK

SEQ ID NO: 1908 - protein, 112 aa, Homo sapiens
EIVLTQSPLSLPVTLGQPASISCRSSLRLVHTDGNTYLNWFQQRPGQSPRRLIYKVSNRDSGVPDRFSGSGSGTDFTLKISRVEAEDIGVYYCMQGTEWPRTFGQGTKVDIK

SEQ ID NO: 1909 - protein, 107 aa, Homo sapiens
DIVMTQSPGTLSLSPGERAALSCRASQIVTRSQLAWYQHKPGQPPRLLIYDSSSRATGTPDRFSGSGSGTDFTLTISRLEPEDSAVYYCHQYSGSATFGPGTKVEIK

SEQ ID NO: 1910 - protein, 110 aa, Homo sapiens
SYELTQPPSVSGAPRQKVTISCSGSSANIASNGVNWYQQLPGKAPKLLIYYDDLVSSGVSDRFSGSKSGTSASLAISGLQSEDEADYYCATWDDILNGPVFGGGTKLTVL

SEQ ID NO: 1911 - protein, 107 aa, Homo sapiens
DIRMTQSPSSLSASVGDRVTITCRASQGFGNKVAWYQQKPGTAPKLLIYETSTLQSGVPSRFSGSGSGTEFAFTISSLQPEDGATYYCQKYNRAPWTFGQGTKVEIK

SEQ ID NO: 1912 - protein, 111 aa, Homo sapiens
QSALIQPASVSGSPGQSITISCTGTSSDVGRYNYVSWYQQHPGKAPKLMIYDVSNRPSGVSNRFSGSKSGNTASLTISGLQAEDEAAYYCSSYISDIKLVVFGGGTKLTVL

SEQ ID NO: 1913 - protein, 108 aa, Homo sapiens
QSALIQPRSVSGSPGQSVTISCTGTSSDVGGSNYVSWYQQHPGKAPKLLVYDVTKRPSGVPDRFSGSKSGNTASLTISGLQAEDEADYYCCSYAGTYIFGTGTKLTVL

SEQ ID NO: 1914 - protein, 110 aa, Homo sapiens
QSVLTQPPSVSGSPGQSVSISCSGTSSDFGNYNRISWYQQTPGTAPKVIIYEVNSRPSGVPDRFSGSKSGNTASLTITGLQAEDEADYYCCSYRSDNTYIFGGGTKVTVL

SEQ ID NO: 1915 - protein, 112 aa, Homo sapiens
ETTLTQSPLFLPVTLGQPASISCRSSQRLVHTNGNTYLNWFQQRPGHSPRRLIYQVSNRDSGVPDRFSGSGSGTDFTLKISRVEAEDVGVYYCMQGTEWPRTFGGGTKLEIK

SEQ ID NO: 1916 - protein, 112 aa, Homo sapiens
QPVLTQPPSASGTPGQRVTISCSGGSSNIGSNSVNWYQQLPGTAPKLLIYSNSQRPSGVPDRFSGSKSGTSASLAISGLQSEDEADYYCAAWDDSLNTFRYVFGTGTKVTVL

SEQ ID NO: 1917 - protein, 107 aa, Homo sapiens
ETTLTQSPSSLSASVGDRVNITCRASQSISTYLTWYQQKPGKAPKLLIYGASSLHSGVPSRFTGVGSGTEFTLSISSLQPEDFATYYCQQSYNTFFTFGGGTKVDIK

SEQ ID NO: 1918 - protein, 107 aa, Homo sapiens
DIRLTQSPSSLSASVGDRVTITCRASQAIAGWLAWYQQKPGRAPKSLIYRASSLQSGVPSRFSGSGSGTDFSLTISNLQPEDSATYYCQHYDSYPTAFGQGTRLEIK

SEQ ID NO: 1919 - protein, 112 aa, Homo sapiens
ETGLTQIPFSLPVTFGQPASISCRFSQRLVHTDGNTNLNWFLQRPGQFPRGLIYKVFNRDSGVPDRFRGSGSGIDFTLKISRVEVEDVGIYYGMQGTEWLGTFGQGTKVEIK

SEQ ID NO: 1920 - protein, 112 aa, Homo sapiens
ETTLTQSPLSLAVTLGQPASISCRSSLGLVHTNGNTYLNWFQQRPGQSPRRLIYRVSNRDSGVPDRFSGSGSVTDFTLTISRVEAEDIGVYYCMQGTEWPRTFGQGTKVEIK

SEQ ID NO: 1921 - protein, 112 aa, Homo sapiens
ETTLTQSPLSLSVTLGQAASISCTCSQTAVHSDGNTYLNWFHQRPGQSPRRLIYKVSNRDSGVPDRFSGSGSGTDFTLKISRVEAEDVGIYYCMQTTDWPRTFGQGTKVDIK

SEQ ID NO: 1922 - protein, 107 aa, Homo sapiens
EIVMTQSPASLSASVGDRVTITCRAGQSISTNLCWYQQRQGKAPKLLIYAASSLRSGVPSRFSGSGSGTDFTLTISSLQPEDFATYYCQQSYSTPPTFGGGTKVDIK

SEQ ID NO: 1923 - protein, 108 aa, Homo sapiens
DIQVTQSPATLSVSPGERVTLSCRASQSISNTLAWYQQKPGQAPRLLIYGASTRATGIPARFSGSGSGTEFTLTISSLQSEDFAVYYCHQYNKWPPITFGGGTKVEIK

SEQ ID NO: 1924 - protein, 107 aa, Homo sapiens
DIQMTQSPSSLSASVGDRVTISCRASQGISTFLAWFQQRPGKAPKSLIYAASKLQSGVPSRFSGSDSGPDFTLTIDNLRPEDSATYYCKQYNSYPYTFGQGTKLEIK

SEQ ID NO: 1925 - protein, 107 aa, Homo sapiens
EIVMTQSPSSLSASVGDSVTITCRASQSISNYLNWYQDKPGKAPELLIYAASNLQSGVPSRFSGSGSGTDFTLTISSLQPEDFATYYCQQSYSDSWTFGQGTKVDIK

SEQ ID NO: 1926 - protein, 112 aa, Homo sapiens
ETTLTQSPLSLPVTLGQPASISCRSSQRIVHTDGNTYLNWFLQRPGQSPRRLIYKVSNRDSGVPDRFSGSGSGTDFTLKISRVEAEDVGIYYCMQGTEWPRTFGQGTKVEIK

SEQ ID NO: 1927 - protein, 112 aa, Homo sapiens
DIQMTQSPLSLPVTLGQPASISCRSSQSVVHSDGNTYLNWFHQRPGQSPRRLIYKVSNRDSGVPDRFSGSGSGTDFTLKISRVEAEDIGVYYCMQGTDWPRTFGQGTKVDIK

SEQ ID NO: 1928 - protein, 113 aa, Homo sapiens
GIVLTQSPDSLAVSVGERATINCKSSQTVLYSSKNKHYLAWYQQKPGQPPKLLTSSPSTREPGVPDRFSGSGSGTDFTLTISSLQAEDVAVYYCQQYYTTPYTFGQGTKVDIK

SEQ ID NO: 1929 - protein, 110 aa, Homo sapiens
EIVMTQTPSSLSASVGDRVTITCRASQSISNYVNWYQQKPGRAPNLLIYAASSLQSGVSSRFSGSGSGTDFTLTISSLQPEDFATYYCQQTYSTPPEGPTFGPGTKVEIK

SEQ ID NO: 1930 - protein, 115 aa, Homo sapiens
QPVLTQPASVSGSPGQSVTISCTGTSSDVGSYSDVGNYVSWYQHHPGKAPKLMIYEVRTRPSWVSTRFSGSKSGTTASLTISGLQAEDEADYYCCSYAGASPFVVFGGGTKLTVL

SEQ ID NO: 1931 - protein, 107 aa, Homo sapiens
EIVMTQSPGTLSSSPGERATLSCRASQSVSSRYLAWYQQKPGQAPRLLIYGTSNRATGIPDRFSGSGSGTDFTLTISRLEPEDFAVYYCQQYGSSYTFGPGTKLEIK

SEQ ID NO: 1932 - protein, 112 aa, Homo sapiens
DIVMTQSPLSLPVGLGQSASISCRSSQRVVHTDGNTYLNWFHQRPGQSPRRLIYKVSNRDSGVPDRFSGSGSGTDFTLRISRVEAEDVGVYYCMQATEWPRTFGQGTKVEIK

SEQ ID NO: 1933 - protein, 112 aa, Homo sapiens
DIRLTQSPLSLSVTLGQAASISCTCSQSAVHSDGTTYFNWFHQRPGQSPRRLIYKVSNRDSGVPDRFIGSGSGTHFTLKISRVEAEDVGVYYCMQTTDWPRTFGQGTKVEIK

SEQ ID NO: 1934 - protein, 112 aa, Homo sapiens
ETTLTQSPLSLPVTLGQPASISCRSSQSVVHSDGNTYLNWFHQRPGQSPRRLIYKVSNRDSGVPDRFSGSGSGTDFTLKISRVEAEDIGVYYCMQGTDWPRTFGQGTKVEIK

SEQ ID NO: 1935 - protein, 112 aa, Homo sapiens
ETTLTQSPLSLPVTLGQPASISCTSSQTVVHTDRNTYLNWYHQRPGQSPRRLIYKVSNRDSGVPDRFSGSGSGSHFTLKISRVEAEDVGVYYCMQGTEWPRTFGQGTKLEIK

SEQ ID NO: 1936 - protein, 110 aa, Homo sapiens
QPGLTQPASVSGSPGQSITISCTGTSGDVGSDNLVSWYQRHPGKAPKLMIYEGSKRPSGVSHRFSGSNSGNTASLTISGLQAEDDADYYCCSYAGDDTVVFGGGTKLTVL

SEQ ID NO: 1937 - protein, 108 aa, Homo sapiens
DIVLTQSPGTLSLSPGERVTLSCRASQSISSNYLAWYQQKPGQAPRLLISDASSRATGIPDRFSGSGSGADFTLIISRLEPEDFAVYFCHQYGGSPTTFGQGTKVEIK

SEQ ID NO: 1938 - protein, 112 aa, Homo sapiens
ETTLTQSPLSLPVTLGQPASISCRSSQIAMHSDGNTYLSWFHQRPGQPPRRLIYKISNRDSGVPDRFSGSGSGTDFTLKISRVEAEDIGTFYCMQGTDWPRTFGQGTKVEIK

SEQ ID NO: 1939 - protein, 106 aa, Homo sapiens
ETTLTQSPATLSLSPGERATLSCRASQSVSSYLAWYQQKPGQAPRLLIYDAFNRATGVPARFSGSGSGTDFTLTISSLEPEDFAVYYCQQRTSTLTFGGGTKVDIK

SEQ ID NO: 1940 - protein, 112 aa, Homo sapiens
ETTLTQSPLSLPVTLGQAASISCRSSQAVVHSDGNTYLNWFQQRPGQPPRRLIYKVSNRDSGVPDRFSGSGSGTVFTLKISRVEAEDIGVYYCMQGTEWPRTFGQGTKVEIK

SEQ ID NO: 1941 - protein, 110 aa, Homo sapiens
QSVLTQPPSVSAAPGQKVTISCSGSSSNLGNNYVSWYQQLPGTAPKLLIYDNHKRPSGIPDRFSGSKSGTSATLGITGLQTGDEADYYCETWDSSLSVVVFGGGTKVTVL

SEQ ID NO: 1942 - protein, 110 aa, Homo sapiens
QSVLTQPPSVSATPGQKVTISCSGSSSNIGNNYVSWYQQLPGTAPKLLIYDNNKRPSGIPDRFSGSKSGTSATLGITGLQTGDEADYYCGTWDSRLSAVVFGGGTKLTVL

SEQ ID NO: 1943 - protein, 107 aa, Homo sapiens
DIRVTQSPATLSLSPGERATLSCRASENIAHYLAWYQQKPGQAPRLVIYDASSRATGIPGRFSGSGAGTDFTLTINSLEPEDFAVYYCQQRSNWPQNFGGGTKVDIK

SEQ ID NO: 1944 - protein, 107 aa, Homo sapiens
DIRLTQSPSSLSASVGDRVTITCRASQDISSWLAWYQQKSGKAPKSLIYAASSLQNGVPSRFSGSRSGTDFTLTISSLQPEDLGTYYCQQYDSYPVTFGQGTRLEIK

SEQ ID NO: 1945 - protein, 112 aa, Homo sapiens
DIVLTQTPDSLAVSLGERATINCKSSQSVLYSSNNKNYLAWYQQKPGQPPKLLIYWASTRESGVPDRFSGSGSGTDFTLTISSLQAEDVAVYYCQQYYTMWTFGQGTKVEIK

SEQ ID NO: 1946 - protein, 112 aa, Homo sapiens
QSVLTQPPSVSAAPGQKVTISCSGSSSNIGNDYVSWYQQLPGTAPKLLIYENYKRPSGIPDRFSGSKSGTSATLDITGLQTGDEADYYCGTWDSSLSVDNYVFGTGTKLTVL

SEQ ID NO: 1947 - protein, 112 aa, Homo sapiens
DIVLTQSPLSLPVTLGQPASISCRSSQSVVHSDGNTYLNWFHQRPGQSPRRLIYKVSNRDSGVPDRFSGSGSGTDFTLKISRVEAEDIGVYYCMQGTDWPRTFGQGTKVDIK

SEQ ID NO: 1948 - protein, 112 aa, Homo sapiens
ETTLTQSPLSLPVTLGQPASISCRSSQVLVHSDGNTYLNWFQQRPGQSPRRLIYKVSNRDSGVPDRFSGSGSGIDFTLKISRVEAEDIGVYYCMQGTEWPRTFGQGTKVDIK

SEQ ID NO: 1949 - protein, 107 aa, Homo sapiens
DIQLTQSPSSLSASVGDRVTITCRASQSISHYLNWYQQKPGKAPKLLIYAASNLQSGVPSRFSGNGSGTDFTLTISSLQPEDFATYFCQQSYSTPLTFGGGTKVDIK

SEQ ID NO: 1950 - protein, 107 aa, Homo sapiens
EIVLTQSPATLSLSPGERATLSCRASENIAHYLAWYQQKPGQAPRLVIYDASSRATGIPGRFSGSGAGTDFTLTINSLEPEDFAVYYCQQRSNWPQNFGGGTKVEIK

SEQ ID NO: 1951 - protein, 110 aa, Homo sapiens
QSVLTQPPSVSGAPGQRVTISCTGSSSNIGAGYYVHWYQQLPGTAPKLLIYDNNNRPSGVPDRFSGSRSGTSASLAITGLQAEDEGDYFCQSYDSSLSASFGGGTKVTVL

SEQ ID NO: 1952 - protein, 111 aa, Homo sapiens
QSVLTQPPSVSGAPGQRVTISCTGSNSNIGAGYDVHWYQQLPETAPKLLIYANGNRPSGVPDRFSGSKSGTSASLAITGLQAEDEADYYCQSYDSSLSGVLFGGGTKLTVL

SEQ ID NO: 1953 - protein, 112 aa, Homo sapiens
DIQLTQSPLSLPVTLGQPASISCRSSQHLVHSDGNTYLNWFQQRPGQSPRRLIYKVSNRDSGVPDRFSGSGSGIDFTLKISRVEAEDIGVYYCMQGTEWPRTFGQGTKVEIK

SEQ ID NO: 1954 - protein, 108 aa, Homo sapiens
DIQVTQSPATVSVSPGEGASLSCRASQSVRSNLAWFQQKPGQAPRLLISDASTRASGVPARFTGSGFGTEFTLTISSLQSEDFAIYYCQQYNTWPPLTFGGGTKVEIK

SEQ ID NO: 1955 - protein, 112 aa, Homo sapiens
DIRLTQSPLSLPVTLGQPASISCRSSQSLVHSNGNTYLNWFQQRPGQSPRRLIYEVSNRDSGVPDRFTGSGSGTDFTLKISRVEAEDVGVYYCMQGTHWPRSFGGGTKVEIK

SEQ ID NO: 1956 - protein, 109 aa, Homo sapiens
ETTLTQSPGTLSLSPGERATLSCRASQSIGSSYLAWYQQKPGQAPRLLIYGASSRATGIPDRFSGSGSGTDFTLTISRLEPEDFAVYYCQQYGSAPLYTFGQGTKVEIK

SEQ ID NO: 1957 - protein, 108 aa, Homo sapiens
EIVLTQSPGTLSLSPGERASLSCRASQSVSSSYLAWYQHRPGQAPRLLIYDASSRATGIPDRFSGSGSGTDFTLTISRLESEDFAVYYCQQYGNSPRTFGQGTKVDIK

SEQ ID NO: 1958 - protein, 110 aa, Homo sapiens
QPVLTQPPSVSAAPGQKVTISCSGSSSNIGDNYVSWYQQLPGTAPKLLIYDNNKRPSGIPDRFSGSKSGTSATLGITGLQTGDEADYYCETWDTSLSVVVFGGGTKLTVL

SEQ ID NO: 1959 - protein, 112 aa, Homo sapiens
DIVMTQTPLSLAVTLGQPASISCRSSHGLVHTNGNTYLNWFHQRPGQPPRRLIYKISNRDSGVPDRFSGSGSGTDFTLKISRVEADDVGVYYCMQGTDWPRTFGQGTKVEIK

SEQ ID NO: 1960 - protein, 107 aa, Homo sapiens
EIVLTQSPGTLSLSPGERATLSCRASQTVTRSQLAWYQHKPGQPPRLLIYDSSKRATGSPDRFSASGSGTDFTLTISGLEPEDTGIYYCLQYSDATTFGPGTKLEIK

SEQ ID NO: 1961 - protein, 107 aa, Homo sapiens
EIVMTQSPSSLSASIGDRVTISCRASQNIGSYLNWYQQRPGKAPNLLIFVASSLQSGVPSRFSGSGSGTDFTLTISSLQAEDFATYYCQQSYTTPITFGQGTRLEIK

SEQ ID NO: 1962 - protein, 112 aa, Homo sapiens; identical to SEQ ID NO: 1932

SEQ ID NO: 1963 - protein, 109 aa, Homo sapiens
EIVLTQSPATLSLSPGERATLSCRASQSVSNFLAWYQQKPGQPPRLLIYDASNRASGIAARFSGRGSGTDFTLTISSLEPEDFAVYYCQQRRNWPPMYTFGQGTKLEIK

SEQ ID NO: 1964 - protein, 112 aa, Homo sapiens
EIVLTQSPLSLSVTLGQAASISCTCSQTAVHSDGNTYLNWFHQRPGQSPRRLIYKVSNRDSGVPDRFSGSGSGTDFTLKISRVEAEDVGIYYCMQTTDWPRTFGQGTKLEIK

SEQ ID NO: 1965 - protein, 112 aa, Homo sapiens
ETTLTQSPLSLSVTLGQAASISCTCSQSAVHSDGNTYFNWFHQRPGQSPRRLIYKVSNRDSGVPERFSGSGSGTHFTLIISRVEAEDVGVYYCMQTTDWPRTFGQGTKVDIK

SEQ ID NO: 1966 - protein, 111 aa, Homo sapiens
NFMLTQPHSVSESPGKAVIISCTRSSGNIASNFVQWYQQRPGSSPTPVIYEDKLRPSGVPDRFSGSIDRSSNSASLTISGLKTEDEADYYCQSYDSGNLVVFGGGTKLTVL

SEQ ID NO: 1967 - protein, 112 aa, Homo sapiens
DIQMTQSPLSLPVTLGQAASISCRSSQPIPHTDGNTYLNWFHQRPGQSPRRLIHKVSNRDSGVPDRFSGSGSGLDFTLEISGVEAEDVGIYYCMQGTEWPRTFGQGTKVEIK

SEQ ID NO: 1968 - protein, 112 aa, Homo sapiens
EIVMTQTPLSLPVTLGQPASISCRSSHGLVHTNGNTYLNWFHQRPGQPPRRLIYQVSHRDSGVPDRFSGSGSGTDFTLKISRVEADDVGVYYCMQGTDWPRTFGQGTKVDIK

SEQ ID NO: 1969 - protein, 109 aa, Homo sapiens
ETTLTQSPGTLSLSPGERATLSCRASQSVGNNYLAWYQQKPGQAPRLLIYGASSRATGIPDRFSGSGSGTDFTLTISRLEPEDFAVYYCQQYGTSPVYTFGQGTKVEIK

SEQ ID NO: 1970 - protein, 112 aa, Homo sapiens
DIQLTQSPLSLPVTLGQPASISCTSSQNVVHTDGNTYLNWFHQRPGQSPRRLIYKVSNRDSGVPDRFSGSGSGSHFTLKISRVEAEDVGIYYCMQGTDWPRTFGQGTKVEIK

SEQ ID NO: 1971 - protein, 109 aa, Homo sapiens
DIVLTQTPATLSLSPGERATLSCRASQSVSNFLAWYQQKPGQPPRLLIYDASNRASGIAARFSGRGSGTDFTLTISSLEPEDFAVYYCQQRRNWPPMYTFGQGTKVEIK

SEQ ID NO: 1972 - protein, 112 aa, Homo sapiens
QSVLTQPPSVSGAPGQRVTISCTGSSSNIGAGYDVHWYQQVPGTAPKLLIYGNSNRPSGVPDRFSGSKSGTSASLAITGLQAEDEADYYCQSYDSSLSVLYVFGTGTKVTVL

SEQ ID NO: 1973 - protein, 107 aa, Homo sapiens
DIRLTQSPATLSLSPGERATLSCRASQSIGYYLAWFQQKPGQAPRLLIYDASKRATGIPARFSGSGSGTDFTLTISSLEPEDFAVYYCQHRTNWPYTFGQGTKVEIK

SEQ ID NO: 1974 - protein, 110 aa, Homo sapiens
QPGLTQEPSLTVSPGGTVTLTCGSSAGAVTSGHYPYWFQQKPGQAPRTLIYDTNNKYSWTPARFSGSLLGGKAALTLSGAQPEDEAEYFCFLSYRGAPPVFGGGTHLTVL

SEQ ID NO: 1975 - protein, 107 aa, Homo sapiens
DIRMTQSPFSLSASVGDRVTITCRASQGFGNRLAWYQQKPGRAPKLLIYDASTLQSGVPSRFSGSGSETDFALTISSLQPEDVATYYCQKHDRDPWTFGQGTKVEIK

SEQ ID NO: 1976 - protein, 112 aa, Homo sapiens
DIVMTQSPLSLPVTLGQPASISCRSSQRLVHSDGNTYLNWFQQRPGQSPRRLIYKVSNRDSGVPDRFSGSGSGTDFTLKISRVEAEDIGVYYCMQGTEWPRTFGQGTKVEIK

SEQ ID NO: 1977 - protein, 107 aa, Homo sapiens
ETTLTQSPASVSASVGDRVTISCRASQGIGRWLAWYQQKPGRAPKLLIFSASSLQSGVPSRFSGSGSGTDFTLTISSLQPEDFATYYCQQAESFPFTFGGGTKVEIK

SEQ ID NO: 1978 - protein, 112 aa, Homo sapiens
ETTLTQSPLSLPVDLGQSASISCRSSQRVVHTNGNTYLHWFHQRPGQAPRRLIYKVSNRESGVPDRFSGSGSGTDFTLRISRVEAEDVGVYYCMQATDWPRTFGQGTKVEIK

SEQ ID NO: 1979 - protein, 106 aa, Homo sapiens
CIRLTQSPATLSLSPGERATLSCRASQSVTSYLAWYQQRPGQAPRLLIYDTSNRVTGVPVRFSGSGYGTDFTLTISSLEPEDFAVYYCQQRGNGYTFGPGTKVEIK

SEQ ID NO: 1980 - protein, 112 aa, Homo sapiens
ETTLTQSPLSLPVGLGQSASISCRSSQRVVHTDGNTYLNWFHQRPGQSPRRLIYKVSNRDSGVPDRFSGSGSGTDFTLRISRVEAEDVGVYYCMQATEWPRTFGQGTKVDIK

SEQ ID NO: 1981 - protein, 112 aa, Homo sapiens
EIVMTQSPLSLPVTLGQPASISCRSSQSVVHSDGNTYLNWFHQRPGQSPRRLIYKVSNRDSGVPDRFSGSGSGTDFTLKISRVEAEDIGVYYCMQGTDWPRTFGQGTKLEIK

SEQ ID NO: 1982 - protein, 112 aa, Homo sapiens
DIVMTQSPLSLPVDLGQSASISCRSSQTAVHTNGNTYLHWFHQRPGQAPRRLIYKVSNRESGVPDRFSGSGSGTDFTLRINRVEAEDVGVYYCMQATDWPRTFGQGTKLEIK

SEQ ID NO: 1983 - protein, 107 aa, Homo sapiens
DIVLTQTPSSLSASVGDRVTITCRASQTISYYLNWYQQKVGKAPQLLVYAASSLQSGVPSRFSGSGSGTDFTLTISSLQPEDFATYYCQQSYSVPLTLGQGTKVDIK

SEQ ID NO: 1984 - protein, 112 aa, Homo sapiens
DIQMTQSPLSLPVDLGQSASISCRSSQRVVHTNGNTYLHWFHQRPGQAPRRLIYKVSNRESGVPDRFSGSGSGTDFTLRISRVEAEDVGVYYCMQATDWPRTFGQGTKVEIK

SEQ ID NO: 1985 - protein, 113 aa, Homo sapiens
QPGLTQPASVSGSPGQSITISCTRTSGDVGDYNSVSWYVSWYQQHPGRAPKLMLYDVSNRPSGVSNRFSGSKLGDTASLTISELQAEDEADYYCSTYTSTSTIFGGGTKLTVL

SEQ ID NO: 1986 - protein, 112 aa, Homo sapiens
DIQMTQSPLSLPVTLGQPASISCRASQTVVHTNGNTYLNWFHQRPGQSPRRLIYEVSNRDSGVPDRFSGSGSGTDFTLSISRVEAEDIGVYYCMQGTDWPRTFGPGTKVEIK

SEQ ID NO: 1987 - protein, 112 aa, Homo sapiens
DIRLTQSPLSLPVDLGQSASISCRSSQTVVHTNGNTYLHWFHQRPGQAPRRLIYKVSNRESGVPDRFSGSGSGTDFTLRISRVEAEDVGVYYCMQATDWPRTFGQGTKVDIK

SEQ ID NO: 1988 - protein, 107 aa, Homo sapiens
DIRVTQSPSSLSATVGDRVTITCRASQTITKYLNWYQQKPGKAPKLLLYGASSLQSGVPSRFSGSGSGTDFTLTISSLQPEDFATYYCQQTYITPGTFGQGTRLEIK

SEQ ID NO: 1989 - protein, 113 aa, Homo sapiens
DIRLTQSPDSLALSLGERATINCKSSQSVLFSSNNNNYLGWYQQKPGQPPKLLIYWASTRESGVPDRFSGSGSGTDFTLTISSLQAEDVAVYYCQQYYLTPWTFGQGTKVDIK

SEQ ID NO: 1990 - protein, 110 aa, Homo sapiens
QPVLTQPASVSGSPGQSITISCTGTSSDVGNYNVVSWYQQHPGKAPQLFIYEDTKRPSGVSDRFSGSKSGITASLTISRLQPEDEADYYCCSYAVSGTVLFGGGTKVTVL

SEQ ID NO: 1991 - protein, 107 aa, Homo sapiens
EIVLTQSPGTLSVSPGERATLSCRASQIINRSQLGWYQHKPGQAPRLLIFDSSKRATGTPDRFSASGSETDFTLTISGVEPEDSGVYYCLQYSLATTFGPGTKVDIK

SEQ ID NO: 1992 - protein, 106 aa, Homo sapiens
DIQLTQSPATLSLSPGERATLSCRASPSVFTFLAWYQQRPGQPPRLLIHDVSNRAPGIPARFSGSGSGTDFTLIISSLEPDDSAVYFCQQRSDGYNFGPGTKVDIK

SEQ ID NO: 1993 - protein, 108 aa, Homo sapiens
DIRVTQSPSSLSASVGDRVTITCRASQTINNYLNWYQQKPGKAPNLLIYAASTLQNGVPSRFSGSGSGTDFTLTISSVQPEDFATYYCQQTYITPTWTFGQGTKVEIK

SEQ ID NO: 1994 - protein, 107 aa, Homo sapiens
EIVMTQSPSSLSASVGDRVTITCRASQSISNYLYWYQQKPGKAPKLLIYVASNLQSGVPSRFSGSGSGTDFTLTISSLQPEDFATYYCQQSYSTPYNFGQGTKVDIK

SEQ ID NO: 1995 - protein, 106 aa, Homo sapiens
EIVLTQSPSTLSASVGDRVTITCRASQNVNNWLAWYQQKPGKAPKLLIYEASTLKSGVPSRFSGSGSGTEFTLTISSLQPDDFATYYCQQYNSQYTFGQGTKVDIK

SEQ ID NO: 1996 - protein, 110 aa, Homo sapiens
QPVLTQPRSVSGSPGQSVTISCTGSSSTFGTDNHISWYQQLPGKVPKLIIHAVSQRPSVVPDRFSGSRSGNTASLTISGLQAEDEADYYCCSSPGTITWVFGGGTKVTVL

SEQ ID NO: 1997 - protein, 110 aa, Homo sapiens
QSVLTQPPSVSGVPRQKVTISCSGSTANIASNGVNWYQLVPGKAPRLLISYDDLVPSGVSARFSGSKSGTSASLAISGLQAEDEADYYCATWDDILNGPVFGGGTKLTVL

SEQ ID NO: 1998 - protein, 112 aa, Homo sapiens
DIVLTQSPLSLPVTLGQSASISCRSSQGLVHSDGNIYLNWFQQRPGQSPRRLIYKVSNRDSGVPDRFSGSGSGTDFTLKISRVEAEDVGLYYCMQATHWPRAFGQGTKLEIK

SEQ ID NO: 1999 - protein, 108 aa, Homo sapiens
EIVMTQSPGTLSLSPGERVTLSCRATQSVSNNHLAWYQQKPGQAPRLLIYGASTTATDIPDRFSGRVAGTDFTLTISRLDPEDFAVYYCHQYGSSPWTFGQGTKVEIK

SEQ ID NO: 2000 - protein, 109 aa, Homo sapiens
DIRLTQSPATLSLSPGERATLSCRASQSVSSSLAWYQQKPGQAPRLLIYEASNRATGVPARFSGSGSGTDFTLAISSLEPEDFAVYYCQHRSNWPPRYTFGQGTKVEIK

SEQ ID NO: 2001 - protein, 108 aa, Homo sapiens
SYELTQPPSVSVSPGQTARITCSGDALPRRYAYWYQQRSGQAPVLVIYEDNKRPSGIPERFSAFSSGTRATLTISGAQVEDEADYYCYSTDSTANYKVFGGGTKVTVL

SEQ ID NO: 2002 - protein, 108 aa, Homo sapiens
SYELTQPPSVSVSPGQTARITCSGDALPRRYAYWYQQRSGQAPVLVIYEDNKRPSGIPERFSAFSSGTRATLTISGAQVEDEADYYCYSTDSTANYKVFGGGTKLTVL

SEQ ID NO: 2003 - protein, 108 aa, Homo sapiens; identical to SEQ ID NO: 2002

SEQ ID NO: 2004 - protein, 115 aa, Homo sapiens
QSVLTQPSSLSASPGASASLTCTLHSGFNVGDHTINWYQQRPGSPPRYLLKYKSDSDKEQGSGVPIRFSGSKDASANAGFLLISGLRSEDEADYYCMIWHDNAVVFGGGTKLTVL

SEQ ID NO: 2005 - protein, 108 aa, Homo sapiens
EIVLTQSPATLSVSPGDGASLSCRASQSVGSNLAWYQQKPGQAPRLLISDASARATGVPARFTGSGSGTDFTLTISSLQSEDFAVYYCHQYNTWPPLTFGGGTKLEIK

SEQ ID NO: 2006 - protein, 112 aa, Homo sapiens
EIVMTQSPLSLPVTLGQSASISCRSSQGLVHSDGNIYLNWFQQRPGQSPRRLIYKVSNRDSGVPDRFSGSGSGTDFTLKISRVEAEDVGLYYCMQATHWPRAFGQGTKVDIK

SEQ ID NO: 2007 - protein, 112 aa, Homo sapiens
DIVMTQSPLALSVTPGQPASISCKSSQSLLHSDGKTYFYWYLQKPGQSPHLLIYEVSNRFSGVPDRFSGSGSGTDFTLKISRVEAEDVGVYYCMQSIQVPITFGGGTKLEIK

SEQ ID NO: 2008 - protein, 107 aa, Homo sapiens
DIVMTQSPATLSVSPGERATLSCRASQSVSSNLAWYQQKPGQAPRLLIYGASTRATNIPARFSGSGSGTEFTLTISSLQSEDFAVYYCQQYNLWPYTFGQGTKVDIK

SEQ ID NO: 2009 - protein, 107 aa, Homo sapiens
EIVLTQSPSSLSASVGDRVTISCRASQGISTFLAWFQQRPGKAPKSLIYAASKLQSGVPSRFSGSDSGPDFTLTIDNLQPEDSATYYCKQYNSYPYTFGQGTKLEIK

SEQ ID NO: 2010 - protein, 110 aa, Homo sapiens
QSVVTQPPSVSAAPGQKVTISCSGSSSNIGNNYVSWYQQLPGTAPKLLIYDSDKRPSGIPERFSGSKSATSATLGITGLQTGDEADYYCETWDDSLSAVVFGGGTKLTVL

SEQ ID NO: 2011 - protein, 112 aa, Homo sapiens
DIVLTQSPLSLSVTPGQPASISCRSSQSLQHTDGKTYLYWYLQKPGQSPQLLIYELFNRFSGVPERFSGSGSGTDFTLKISRVEAEDVGIYYCMQSIQTPITFGQGTRLEIK

SEQ ID NO: 2012 - protein, 113 aa, Homo sapiens
DIRVTQSPDSLAVSLGERATINCKSSQSVLYSSNNKNYLAWYQQKIGQPPKLLIYWASIRESGVPDRFTGSGSGTDFTLTISSLQAEDVAVYYCQQYYSTPPTFGGGTKLEIK

SEQ ID NO: 2013 - protein, 112 aa, Homo sapiens
EIVMTQTPLSLPVTLGQPASISCRSSQFVSHTDGNTYLNWFQQRPGQSPRRLIYKVSKRDSGVPDRFSGSGSGTDFTLTISRVEAEDVGVYYCMQATEWPRTFGQGTKVEYQ

SEQ ID NO: 2014 - protein, 114 aa, Homo sapiens
DIVMTQSPDSLAVSLGERATINCKSSQSVLFSSNNKNYLAWYQQKPGLPPKLLIYWASTRKSGVSDRFSGSGSGTDFTLTISSLQAEDVAVYYCQQYYTTPLFTFGPGTKVDIK

SEQ ID NO: 2015 - protein, 112 aa, Homo sapiens
DIVMTQSPLSLPVTLGQPASISCRSSHSLVHTNGNTYLNWFQQRPGQPPRRLIYQVSNRDSGVPDRFSGSGSGTDFTLKISRVEADDVGIYYCMQGTDWPRTFGQGTKVDIK

SEQ ID NO: 2016 - protein, 112 aa, Homo sapiens
ETTLTQSPLSLPVTLGQPASISCRSSQGLAHSNGNTYLNWFHQRPGQSPRRLIYQVSNRDSGVPDRFSGSGSGTDFTLKISRVEAEDVGVYYCMQGTEWPRTFGQGTKVEIK

SEQ ID NO: 2017 - protein, 112 aa, Homo sapiens
DIVMTQSPLSLPVSLGQPASISCRSSQSVVHTDGNTYLNWYQQRPGQSPRRLIYKVSNRDSGVPDRFSGSGSVTDFTLKISRVEAEDVAVYYCMQGTEWPRTFGQGTKVDIK

SEQ ID NO: 2018 - protein, 113 aa, Homo sapiens
DIQMTQSPLSLSVTLGQSASISCRASQTVVHSVDGNTYLNWFHQRPGQSPRRLIYKVSNRDSGVPDRFSGSGSGTDFTLRISRVEAEDIGIYYCMQGTDWPRTFGQGTKVEIK

SEQ ID NO: 2019 - protein, 111 aa, Homo sapiens
QPVLTQPASVSGSPGQSITISCTGTSSDVGSFNYVSWYQQHPGKAPKLVIYDVYNRPSGVSNRFSGSKSGNTASLTISGLQAEDEADYYCSSYTSSSTLYVFGTGTKVTVL

SEQ ID NO: 2020 - protein, 106 aa, Homo sapiens
DIRLTQSPSTLSASVGDRVTITCRASQSISSWLAWYQQKPGKAPNLLIYKASTLESGVPSRFSGSGSGTEFTLTISSLQPDDFATYYCQQYNSGWTFGQGTKVEIK

SEQ ID NO: 2021 - protein, 112 aa, Homo sapiens
DIRLTQSPLSLPVTLGQPASISCTSSQDVVHTDGNTYLNWFHQRPGQSPRRLIYKVSNRDSGVPDRFSGSGSGSHFTLKISRVEAEDAGIYYCMQGTDWPRTFGQGTKVDIK

SEQ ID NO: 2022 - protein, 106 aa, Homo sapiens
EIVLTQSPSSLSASVGDRVTITCRASQDISNYLAWYQQKPGKAPKLLIYAASTLQSGVPLRFSGSGSGTDFTLTISSLQPEDFATYYCLQLHNYSSFGGGTKVDIK

SEQ ID NO: 2023 - protein, 106 aa, Homo sapiens
EIVLTQSPATLSLSPGERATLSCRASQSVSTFLGWYQQRPGQPPRLLIYDASYRAPDIPVRFSGSGSGTDFTLTINSLEPEDSAVYYCQQRSDGYNFGPGTKLEIK

SEQ ID NO: 2024 - protein, 109 aa, Homo sapiens
QSVLTQPASVSGSPGQSITISCTGTSSDVGAYNYVSWYQQHPGKAPKLTVYDVRNRPSGVSNRFSGSKSGNTASLTISGLQAEDEAHYYCSSYTSTNTVFGGGTKLTVL

SEQ ID NO: 2025 - protein, 112 aa, Homo sapiens
DIRLTQTPLSLPVTLGQPASISCRSSQIAMHSDGNTYLSWFHQRPGQPPRRLIYKISNRDSGVPDRFSGSGSGTDFTLKISRVEAEDIGTFYCMQGTDWPRTFGQGTKVDIK

SEQ ID NO: 2026 - protein, 110 aa, Homo sapiens
QSALIQPRSVSGSPGQSVTISCTGSSSTFGTDNHISWYQQLPGKVPKLIIHAVSQRPSVVPDRFSGSRSGNTASLTISGLQAEDEADYYCCSSPGTITWVFGGGTKVTVL

SEQ ID NO: 2027 - protein, 107 aa, Homo sapiens
DIRLTQSPSSLSASVGDRVTIACRASQSVSNYLNWYQQKPGKAPKLLIYAASSLQNGVPSRFGGSGSGTDFTLTISSLQPEDFATYYCQQCYSYPPTFGHGTKVEIK

SEQ ID NO: 2028 - protein, 113 aa, Homo sapiens
DIRMTQSPDSLAVSLGERATINCRTSQSVLYSSNNKNYLGWYQQKPGQPPKLLIYWASTRESGVPDRFSGSGSGTDFTLTISSLQAEDVAVYYCQQYYSTPYTFGQGTKVDIK

SEQ ID NO: 2029 - protein, 111 aa, Homo sapiens
QSALTQPASVSGSPGQSITISCTGTNSDISNSYSVSWYQQYPGKAPKLVIFDVINRPSGVSNRFSGSKSGNTASLTISGLQADDEADYYCCSYTRTNTPVLFGGGTKLTVL

SEQ ID NO: 2030 - protein, 108 aa, Homo sapiens
DIQLTQSPATLSVSPGERATLSCRASQSVTKHLAWYQQKPGQAPRLLIYGASTRATGVPARFSGSGSDTEFSLTISSLQSEDFAVYYCQQYYSWPPLTFGGGTKLEIK

SEQ ID NO: 2031 - protein, 112 aa, Homo sapiens
DIVMTQTPLSLPVTLGQPASISCRASQTVVHTNGNTYLNWFHQRPGQSPRRLIYEVSNRDSGVPDRFSGSGSGTDFTLSISRVEAEDIGVYYCMQGTDWPRTFGPGTKVEIK

SEQ ID NO: 2032 - protein, 112 aa, Homo sapiens
DIQLTQSPLSLPVGLGQSASISCRSSQRVVHTDGNTYLNWYHQRPGQSPRRLIYKVSNRDSGVPDRFSGSGSGTDFTLRISRVEAEDVGVYYCMQSTDWPRTFGQGTKLEIK

SEQ ID NO: 2033 - protein, 112 aa, Homo sapiens
DIVLTQSPLSLPVGLGQSASISCRSSQRVVHTDGNTYLHWFHQRPGQSPRRLIYKVSNRDSGVPDRFSGSGSGTDFTLRISRVEAEDVGVYYCMQGTEWPRTFGQGTKLEIK

SEQ ID NO: 2034 - protein, 108 aa, Homo sapiens
ETTLTQSPVTLSVSPGERATLSCRASQSVISNLAWYQQKPGQAPRLLIFGASTRATGVPARFSGSGSGTEFTLTISSLQSEDFAVYYCQQYNNWPSLTFGGGTKLEIK

SEQ ID NO: 2035 - protein, 112 aa, Homo sapiens
DIQVTQSPLSLPVGLGQSASISCRSSQRVVHTDGNTYLNWFHQRPGQSPRRLIYKVSNRDSGVPDRFSGSGSGTDFTLRISRVEAEDVGVYYCMQATEWPRTFGQGTKVDIK

SEQ ID NO: 2036 - protein, 106 aa, Homo sapiens
EIVMTQSPATLSLSPGERATLSCRASQSVSTFLGWYQQRPGQPPRLLIYDASYRAPDIPVRFSGSGSGTDFTLTINSLEPEDSAVYYCQQRSDGYNFGPGTKLEIK

SEQ ID NO: 2037 - protein, 108 aa, Homo sapiens
QPVLTQPPSVSVSPGQTARITCSGDALPRRYAYWYQQRSGQAPVLVIYEDNKRPSGIPERFSAFSSGTRATLTISGAQVEDQADYYCYSTDSTANYKVFGGGTKLTVL

SEQ ID NO: 2038 - protein, 113 aa, Mus musculus
DIVMSQSPSSLAVSVGEKITMSCKSSQSLLYTSDQKNYLAWFQQKPGQSPKLLIFWASTRDSGVPDRFTGSGSGTDFTLTISSVKAEDLAVYYCQQFYNYPRTFGGGTKLEIK

SEQ ID NO: 2039 - protein, 107 aa, Mus musculus
IVMTQTPKFLLVSAGDRVTITCKASQSVSNDVAWFQQKPGQSPKKLLIYFASNRYTGVPDRFTGSGYGTDFTFTITTVQAEDLAVYFCQQDYSSPWTFGGGTKLEIK

SEQ ID NO: 2040 - protein, 106 aa, Mus musculus
IVMTQTPKFLLVSAGDRVTITCKASQSVSNDVAWFQQKPGQSPKLLIYFASNRYTGVPDRFTGSGYGTDFTFTITTVQAEDLAVYFCQQDYSSPWTFGGGTKLEIK

SEQ ID NO: 2041 - protein, 113 aa, Mus musculus
DIVMTQAAPSEPVTPGESVSISCGSSKSLLHSNDNTYLYWFLQRPGQSPQLLIYRMSNLASGVPDRFTGSGSGTAFTLRISRVEAEDVGVYYCMQHLENPLGVRWRHQAGNQT

SEQ ID NO: 2042 - protein, 108 aa, Mus musculus
QIVLTQSPAIMSASLGERVTMTCTASSSVSSSYLHWYQQKPGSSPKLWIYSTSNLASGVPARFSGSGSGTSYSLTISSMEAEDAATYYCLQYHRSPWTFGGGTKLEIK

SEQ ID NO: 2043 - protein, 109 aa, Homo sapiens
QAVVTQEPSLTVSPGGTVTLTCGSSTGPVTSDHYPYWFQQKPGQAPTTLIYDTNNKHSWTPARFSGSLLGGKAALTLSGAQPEDEAEYYCLLSYTGARVFGGGTKLTVL

SEQ ID NO: 2044 - protein, 107 aa, Homo sapiens
DIQMTQSPSSVSASVGDRVTITCRASQGISSWLAWYQQKPGKAPKLLIYAASSLQSGVPSRFSGSGSGTDFTLTISSLQPEDFATYYCQQANSFPGTFGQGTKVEIK

SEQ ID NO: 2045 - protein, 107 aa, Homo sapiens; identical to SEQ ID NO: 2044

SEQ ID NO: 2046 - protein, 107 aa, Homo sapiens
DIQMTQSPSSLSASVGDRVTITCRASQNISSYLNWYQQKPGKAPNLLIYAASSLQSGVPPRFSGSGSGTDFTLTISSLQPEDFATYYCQQSYSTLYSFGQGTKLEIK

SEQ ID NO: 2047 - protein, 107 aa, Homo sapiens
DIQMTQSPSSLSASVGDRVTITCRASQGIRNDLGWYEQKPGKAPKRLIYAASSLESGVPSRFSGSGSGTEFTLTISSLQPEDFATYYCLQHNTYPFTFGPGTRVDIK

SEQ ID NO: 2048 - protein, 108 aa, Homo sapiens
EIVLTQSPGTLSLSPGERATLSCRASQSVSSSYLAWYQQKPGQAPRLLIYGVSSRATGIPDRFSGSGSGTDFTLTISRLEPEDFVVYYCHQYGSSPWTFGQGTKVEIK

SEQ ID NO: 2049 - protein, 106 aa, Homo sapiens
DIQMIQSPSSVSASVGDRVTITCRASQGISSWLAWYQQKPGKAPKLLIYAASTLLSAVPSRFSGSGSGTDFTLTISSLQPEDFATYYCQQGNSFPFTFGPGTIVDV

SEQ ID NO: 2050 - protein, 107 aa, Homo sapiens; identical to SEQ ID NO: 2047

SEQ ID NO: 2051 - protein, 106 aa, Homo sapiens
DIQMTQSPSSVSASVGDRVTITCRASQGISSWLAWYQQKPGKAPKLLIYAASTLLSAVPSRFSGSGSGTDFTLTISSLQPEDFATYYCQQGNSFPFTFGPGTKVDV

SEQ ID NO: 2052 - protein, 107 aa, Homo sapiens; identical to SEQ ID NO: 2047

SEQ ID NO: 2053 - protein, 108 aa, Homo sapiens
EIVLTQSPGTLSLSPGERATLSCRASHSVDRSYLAWYQQKPGLAPRLLIYGASSRATGIPDRFSGSGSGTDFTLTISRLEPEDFALYYCQHFGTSSVTFGRGTRLEIK

SEQ ID NO: 2054 - protein, 108 aa, Homo sapiens
EIVLTQSPGTLSLSPGERATLSCRASQSVSSSYLAWYQHKPGQAPRLLICGASSRATGIPDRFSGSGSGTGFTLTISRLEPEDFAVYYCQQYGSSPWTFGQGTKVEIK

SEQ ID NO: 2055 - protein, 110 aa, Homo sapiens; identical to SEQ ID NO: 1829

SEQ ID NO: 2056 - protein, 107 aa, Homo sapiens [sequence omitted]

SEQ ID NO: 2057 - protein, 14 aa, Homo sapiens
ARRGDGLYYYGMDV

SEQ ID NO: 2058 - protein, 18 aa, Homo sapiens
ARDRIAPVGKFFGWYFDL

SEQ ID NO: 2059 - protein, 10 aa, Homo sapiens
ARSSSRGFDY

SEQ ID NO: 2060 - protein, 16 aa, Homo sapiens
ARELFTAVAGKGGIDY

SEQ ID NO: 2061 - protein, 22 aa, Homo sapiens
AKDFKGGSSSWYTPEIEYGMDV

SEQ ID NO: 2062 - protein, 28 aa, Homo sapiens
ARLIRHEAHTYCSGGSCYSPDYYYGMDV

SEQ ID NO: 2063 - protein, 13 aa, Homo sapiens
ASNPPLGEPYFDI

SEQ ID NO: 2064 - protein, 12 aa, Homo sapiens
ARWGGGMQYLDV

SEQ ID NO: 2065 - protein, 19 aa, Homo sapiens
ARAGPNYDFWSGYYQTFDY

SEQ ID NO: 2066 - protein, 17 aa, Homo sapiens
ATATAMDGYYYYYGMDV

SEQ ID NO: 2067 - protein, 14 aa, Homo sapiens
ASAGSSWYGDAFDI

SEQ ID NO: 2068 - protein, 15 aa, Homo sapiens
ATATIFGVANNWFDP

SEQ ID NO: 2069 - protein, 25 aa, Homo sapiens
AKDLGYYDILTGQLGGYYYYYGMDV

SEQ ID NO: 2070 - protein, 19 aa, Homo sapiens
ARDWDYDILTGSWFGAFDI

SEQ ID NO: 2071 - protein, 15 aa, Mus musculus
ARKDYYYGSSYAMDY

SEQ ID NO: 2072 - protein, 14 aa, Mus musculus
ARDYGSSYVDYFDY

SEQ ID NO: 2073 - protein, 14 aa, Mus musculus
STGGYGNYVDAMDY

SEQ ID NO: 2074 - protein, 15 aa, Mus musculus
ARKDYYGSSSNVMDY

SEQ ID NO: 2075 - protein, 14 aa, Mus musculus
ARKDYYGSSLAMDY

SEQ ID NO: 2076 - protein, 14 aa, Mus musculus
ARRNYDLYYYAMDY

SEQ ID NO: 2077 - protein, 17 aa, Mus musculus
ARSDYYGSSYVGYAMDY

SEQ ID NO: 2078 - protein, 14 aa, Mus musculus
ARRNYDLYYYAMDY

SEQ ID NO: 2079 - protein, 14 aa, Mus musculus
STGGYGNYVDAMDY

SEQ ID NO: 2080 - protein, 15 aa, Mus musculus
ARKDYYGSSSNVMDY

SEQ ID NO: 2081 - protein, 14 aa, Mus musculus
SRRNYDLYYYAMDY

SEQ ID NO: 2082 - protein, 7 aa, Mus musculus
ARGAGAY

SEQ ID NO: 2083 - protein, 7 aa, Mus musculus
ARDHGPA

SEQ ID NO: 2084 - protein, 7 aa, Mus musculus
ARGAGAY

SEQ ID NO: 2085 - protein, 13 aa, Mus musculus
ARISYYDYEGVDY

SEQ ID NO: 2086 - protein, 20 aa, Homo sapiens
ARGAEYYDFWSGYYSAYFDY

SEQ ID NO: 2087 - protein, 14 aa, Mus musculus
ARKDYYGRYYGMDY

SEQ ID NO: 2088 - protein, 11 aa, Mus musculus
AILDSYWYFDV

SEQ ID NO: 2089 - protein, 12 aa, Mus musculus
ARKSYGYWHFDV

SEQ ID NO: 2090 - protein, 7 aa, Mus musculus
AAGKGDY

SEQ ID NO: 2091 - protein, 11 aa, Mus musculus
AILDSYWYFDV

SEQ ID NO: 2092 - protein, 7 aa, Mus musculus
AAGKGDY

SEQ ID NO: 2093 - protein, 13 aa, Mus musculus
ARKGDGYYGGFAY

SEQ ID NO: 2094 - protein, 15 aa, Mus musculus
ATYGSYYLYYYAMNY

SEQ ID NO: 2095 - protein, 14 aa, Mus musculus
ARYDGNLYYYAMDY

SEQ ID NO: 2096 - protein, 13 aa, Mus musculus
ARWDFYGSRTFDY

SEQ ID NO: 2097 - protein, 13 aa, Mus musculus
ARWDFYGSRTFDY

SEQ ID NO: 2098 - protein, 13 aa, Homo sapiens
ARATWLRGVMDVW

SEQ ID NO: 2099 - protein, 19 aa, Homo sapiens
AKDVRYCSSTSCYFSAFDI

SEQ ID NO: 2100 - protein, 13 aa, Homo sapiens
ARGGGSYYYWFDP

SEQ ID NO: 2101 - protein, 17 aa, Homo sapiens
ARAGYSSSWYGVRGVDP

SEQ ID NO: 2102 - protein, 17 aa, Homo sapiens
AKGSDIVVVPVGNWFDP

SEQ ID NO: 2103 - protein, 20 aa, Homo sapiens
ARVQRYYPDSSGFYGRRFDI

SEQ ID NO: 2104 - protein, 14 aa, Homo sapiens
ARSGGGSYRGPFDY

SEQ ID NO: 2105 - protein, 16 aa, Homo sapiens
ARGDRIQLWLLDAFDI

SEQ ID NO: 2106 - protein, 17 aa, Homo sapiens
AKIGLGLGGLLRRYFDY

SEQ ID NO: 2107 - protein, 16 aa, Homo sapiens
GTRIMITWYSRRGMDG

SEQ ID NO: 2108 - protein, 25 aa, Homo sapiens
ARERGDSSGYYEIITTANRRFGMDV

SEQ ID NO: 2109 - protein, 17 aa, Homo sapiens
ARIPGWDRGTDRNWNDD

SEQ ID NO: 2110 - protein, 15 aa, Homo sapiens
ARTYSFDSSGYYYDY

SEQ ID NO: 2111 - protein, 17 aa, Homo sapiens
ARAFYDSNWSVGSYFDS

SEQ ID NO: 2112 - protein, 18 aa, Homo sapiens
AKDSVRREYTHARVPFDN

SEQ ID NO: 2113 - protein, 17 aa, Homo sapiens
AKSSKIFYLGESREVDY

SEQ ID NO: 2114 - protein, 19 aa, Homo sapiens
ARVEYYYGSGSYMPWYFDL

SEQ ID NO: 2115 - protein, 16 aa, Homo sapiens
ATYYYDSSGYSYGMDV

SEQ ID NO: 2116 - protein, 15 aa, Homo sapiens
TEEGSGSEGPIEFDY

SEQ ID NO: 2117 - protein, 16 aa, Homo sapiens
ARDNNYRNYYYYMDVW

SEQ ID NO: 2118 - protein, 20 aa, Homo sapiens
ARGALGCSSTSCYPNNFDYW

SEQ ID NO: 2119 - skipped

SEQ ID NO: 2120 - protein, 21 aa, Homo sapiens
ATSTAVAGTPDLFDYYYGMDV

SEQ ID NO: 2121 - protein, 13 aa, Homo sapiens
ARDFISRPRGYRW

SEQ ID NO: 2122 - protein, 13 aa, Homo sapiens
ARDFISRPRGYRW

SEQ ID NO: 2123 - protein, 16 aa, Homo sapiens
ARGQDDFWSMNWFDPW

SEQ ID NO: 2124 - protein, 13 aa, Homo sapiens
ARDFISRPRGYRW

SEQ ID NO: 2125 - protein, 17 aa, Homo sapiens
TRGSQWATINDARFDYW

SEQ ID NO: 2126 - protein, 13 aa, Homo sapiens
ARVWYYYGPRDYW

SEQ ID NO: 2127 - protein, 16 aa, Homo sapiens
AKDSSSWYNYYGMDVW

SEQ ID NO: 2128 - protein, 14 aa, Homo sapiens
ARVFRGSQYWFDPW

SEQ ID NO: 2129 - protein, 13 aa, Homo sapiens
ARMEAPKLTLDPW

SEQ ID NO: 2130 - protein, 19 aa, Homo sapiens
ARDWDYDILTGSWFGAFDI

SEQ ID NO: 2131 - protein, 13 aa, Homo sapiens
ARPTIGYSYGSDY

SEQ ID NO: 2132 - protein, 18 aa, Homo sapiens
AKVSAIFWLGQGLSPIDV

SEQ ID NO: 2133 - protein, 14 aa, Homo sapiens
ARVQVAAAGSPYDY

SEQ ID NO: 2134 - protein, 16 aa, Homo sapiens
AKDRGYEILTPASFDY

SEQ ID NO: 2135 - protein, 15 aa, Homo sapiens
ATGRYTYGYGYYFDY

SEQ ID NO: 2136 - protein, 13 aa, Homo sapiens
ARDYGGNSNYFHY

SEQ ID NO: 2137 - protein, 11 aa, Homo sapiens
ARIQRGIAADY

SEQ ID NO: 2138 - protein, 11 aa, Homo sapiens
ARDKWEGTFDY

SEQ ID NO: 2139 - protein, 10 aa, Homo sapiens
AETGWDGMDV

SEQ ID NO: 2140 - protein, 16 aa, Homo sapiens
ARHCPWQQLVSNWFDP

SEQ ID NO: 2141 - protein, 21 aa, Homo sapiens
AREKIRSIAAAGTVYYYGMDV

SEQ ID NO: 2142 - protein, 21 aa, Homo sapiens
ARIYRGTMVVVFSDLHWYFDL

SEQ ID NO: 2143 - protein, 12 aa, Homo sapiens
AGLFWYGGYFDY

SEQ ID NO: 2144 - protein, 16 aa, Homo sapiens
ASTYWDSSGYYYGVDY

SEQ ID NO: 2145 - protein, 22 aa, Homo sapiens
AVLDYCSGGSSSSGYYNYGMDV

SEQ ID NO: 2146 - protein, 15 aa, Homo sapiens
ARDSLFSRVDWYFDL

SEQ ID NO: 2147 - protein, 15 aa, Homo sapiens
ALAVGRGIPTSYFDY

SEQ ID NO: 2148 - protein, 13 aa, Homo sapiens
AREGAGLIIAYDY

SEQ ID NO: 2149 - protein, 16 aa, Homo sapiens
ARDGALYSNSPTEFDY

SEQ ID NO: 2150 - protein, 15 aa, Homo sapiens
AKGGNYGDYLRGFDY

SEQ ID NO: 2151 - protein, 19 aa, Homo sapiens
VRGDHSSGWYGTYYYYMDV

SEQ ID NO: 2152 - protein, 24 aa, Homo sapiens
ARGLQYYYDTSGYYKDSYYYGVDV

SEQ ID NO: 2153 - protein, 12 aa, Homo sapiens
ARDLNIAGGFDI

SEQ ID NO: 2154 - protein, 17 aa, Homo sapiens
ARDLAWFGELSESPIEY

SEQ ID NO: 2155 - protein, 23 aa, Homo sapiens
AHRLAPDYDFLTGYYNGDDAFDV

SEQ ID NO: 2156 - protein, 18 aa, Homo sapiens
AREGLLVGPTGRGLGMDV

SEQ ID NO: 2157 - protein, 12 aa, Homo sapiens
ARMVVRGVMLDY

SEQ ID NO: 2158 - protein, 13 aa, Homo sapiens
ATRTGWTNDAFDI

SEQ ID NO: 2159 - protein, 14 aa, Homo sapiens
ARARQLVLNWYFDL

SEQ ID NO: 2160 - protein, 12 aa, Homo sapiens
ARLMYYYGNFDY

SEQ ID NO: 2161 - protein, 19 aa, Homo sapiens
ARVGYYGSGSYPLYWYFDL

SEQ ID NO: 2162 - protein, 15 aa, Homo sapiens
ATGRYTYGYGYYFDY

SEQ ID NO: 2163 - protein, 17 aa, Homo sapiens
ARLASDGSGSYLDYFDY

SEQ ID NO: 2164 - protein, 20 aa, Homo sapiens
ATDGGGGSYYYAHYYYGMDV

SEQ ID NO: 2165 - protein, 18 aa, Homo sapiens
AKDIGVMVPGVTPYGMDV

SEQ ID NO: 2166 - protein, 11 aa, Homo sapiens
ARDPMRPGMDV

SEQ ID NO: 2167 - protein, 13 aa, Homo sapiens
ARESPKLTGYFDY

SEQ ID NO: 2168 - protein, 15 aa, Homo sapiens
ARGRYTYGTEGYFDN

SEQ ID NO: 2169 - protein, 14 aa, Homo sapiens
ARDAVGSYYYGMEV

SEQ ID NO: 2170 - protein, 14 aa, Homo sapiens
AREGLVGTTLTFDY

SEQ ID NO: 2171 - protein, 13 aa, Homo sapiens
ARYYGPQGRAFDI

SEQ ID NO: 2172 - protein, 14 aa, Homo sapiens
ARGTEYGDYDVSHD

SEQ ID NO: 2173 - protein, 14 aa, Homo sapiens
AREGLVGTALAFDY

SEQ ID NO: 2174 - protein, 21 aa, Homo sapiens
AKDPTSLYCSGGSCYNNWFDP

SEQ ID NO: 2175 - protein, 11 aa, Homo sapiens
ARDLDYYGMDV

SEQ ID NO: 2176 - protein, 16 aa, Homo sapiens
AGGGVLVTSDPDAFDI

SEQ ID NO: 2177 - protein, 13 aa, Homo sapiens
AGEQHIVTTIIDY

SEQ ID NO: 2178 - protein, 11 aa, Homo sapiens
ARDYGDYYFDY

SEQ ID NO: 2179 - protein, 11 aa, Homo sapiens
ARQESGWSFDY

SEQ ID NO: 2180 - protein, 13 aa, Homo sapiens
AKGQRGSPDFFDY

SEQ ID NO: 2181 - protein, 9 aa, Homo sapiens
ARAGWELNY

SEQ ID NO: 2182 - protein, 11 aa, Homo sapiens
ARDLVTWGLDY

SEQ ID NO: 2183 - protein, 13 aa, Homo sapiens
STTNDYGDYSANY

SEQ ID NO: 2184 - protein, 19 aa, Homo sapiens
ARGLWFGDLTRTKYNWFDP

SEQ ID NO: 2185 - protein, 16 aa, Homo sapiens
ARDDSSSSGVGTGMDV

SEQ ID NO: 2186 - protein, 11 aa, Homo sapiens
ARITPHLVYDY

SEQ ID NO: 2187 - protein, 23 aa, Homo sapiens
ARTLGAYYDILTGFRTPGGWFAP

SEQ ID NO: 2188 - protein, 23 aa, Homo sapiens
ASPLLSHNYGSGSYYNVYWYFEL

SEQ ID NO: 2189 - protein, 11 aa, Homo sapiens
ARDLENGGLDV

SEQ ID NO: 2190 - protein, 16 aa, Homo sapiens
AAPNCNSTTCHDGFDI

SEQ ID NO: 2191 - protein, 13 aa, Homo sapiens
ARDLPLHGDYFDY

SEQ ID NO: 2192 - protein, 22 aa, Homo sapiens
ARHRRDYITMIVRPTRLWAFDY

SEQ ID NO: 2193 - protein, 13 aa, Homo sapiens
AREAGTTDWYFDL

SEQ ID NO: 2194 - protein, 18 aa, Homo sapiens
ARHPRFSWRGNDSGYFDY

SEQ ID NO: 2195 - protein, 16 aa, Homo sapiens
AHSMVRGVLFGADFDY

SEQ ID NO: 2196 - protein, 15 aa, Homo sapiens
ARDGVDFGMVTLFDY

SEQ ID NO: 2197 - protein, 15 aa, Homo sapiens
AITSVARGLRGYFDT

SEQ ID NO: 2198 - protein, 15 aa, Homo sapiens
AITSLARGLKGYFDS

SEQ ID NO: 2199 - protein, 17 aa, Homo sapiens
ARGWTVPPLWVLNWFDP

SEQ ID NO: 2200 - protein, 18 aa, Homo sapiens
AMTYYDYIWGRVDPQFDP

SEQ ID NO: 2201 - protein, 14 aa, Homo sapiens
ARFITDGYSSGSDS

SEQ ID NO: 2202 - protein, 20 aa, Homo sapiens
AKQASPYCSGGSCYSGNFDY

SEQ ID NO: 2203 - protein, 9 aa, Homo sapiens
AREAYGMDV

SEQ ID NO: 2204 - protein, 12 aa, Homo sapiens
ARDLGEAGGMDV

SEQ ID NO: 2205 - protein, 11 aa, Homo sapiens
ARDLVVYGMDV

SEQ ID NO: 2206 - protein, 11 aa, Homo sapiens
ARDLVVYGMDV

SEQ ID NO: 2207 - protein, 11 aa, Homo sapiens
ARDAMSYGMDV

SEQ ID NO: 2208 - protein, 11 aa, Homo sapiens
ARDAAVYGIDV

SEQ ID NO: 2209 - protein, 11 aa, Homo sapiens
ARDLISRGMDV

SEQ ID NO: 2210 - protein, 11 aa, Homo sapiens
ARDRVVYGMDV

SEQ ID NO: 2211 - protein, 11 aa, Homo sapiens
ARDLVSYGMDV

SEQ ID NO: 2212 - protein, 11 aa, Homo sapiens
ARDLVVYGMDV

SEQ ID NO: 2213 - protein, 11 aa, Homo sapiens
ARDAQNYGMDV

SEQ ID NO: 2214 - protein, 11 aa, Homo sapiens
ARDLGPYGMDV

SEQ ID NO: 2215 - protein, 11 aa, Homo sapiens
ARDYGDYYFDY

SEQ ID NO: 2216 - protein, 19 aa, Homo sapiens
ARPQGGSSWYRDYYYGMDV

SEQ ID NO: 2217 - protein, 17 aa, Homo sapiens
AKEGRPSDIVVVVAFDY

SEQ ID NO: 2218 - protein, 11 aa, Homo sapiens
ARDYGDFYFDY

SEQ ID NO: 2219 - protein, 21 aa, Homo sapiens
ASPASRGYSGYDHGYYYYMDV

SEQ ID NO: 2220 - protein, 16 aa, Homo sapiens
AAPHCSGGSCLDAFDI

SEQ ID NO: 2221 - protein, 18 aa, Homo sapiens
ARRGDGSSSIYYYNYMDV

SEQ ID NO: 2222 - protein, 13 aa, Homo sapiens
AREFGDPEWYFDY

SEQ ID NO: 2223 - protein, 15 aa, Homo sapiens
ARDSPFSALGASNDY

SEQ ID NO: 2224 - protein, 16 aa, Homo sapiens
ARDGIVDTALVTWFDY

SEQ ID NO: 2225 - protein, 31 aa, Homo sapiens
ARGNRLLYCSSTSCYLDAVRQGYYYYYYMDV

SEQ ID NO: 2226 - protein, 20 aa, Homo sapiens
AKVTAPYCSGGSCYGGNFDY

SEQ ID NO: 2227 - protein, 19 aa, Homo sapiens
AKAGVRGIAAAGPDLNFDH

SEQ ID NO: 2228 - protein, 14 aa, Homo sapiens
ARDFDDSSFWAFDY

SEQ ID NO: 2229 - protein, 13 aa, Homo sapiens
ARVPREGTPGFDP

SEQ ID NO: 2230 - protein, 15 aa, Homo sapiens
ARVWQYYDSSGSFDY

SEQ ID NO: 2231 - protein, 21 aa, Homo sapiens
ARHAAAYYDRSGYYFIEYFQH

SEQ ID NO: 2232 - protein, 20 aa, Homo sapiens
AKASGIYCSGGDCYSYYFDY

SEQ ID NO: 2233 - protein, 15 aa, Homo sapiens
ARTMYYYDSSGSFDY

SEQ ID NO: 2234 - protein, 20 aa, Homo sapiens
AKASGIYCSGGNCYSYYFDY

SEQ ID NO: 2235 - protein, 17 aa, Homo sapiens
ARVGYDSSGYSGWYFDL

SEQ ID NO: 2236 - protein, 11 aa, Homo sapiens
VRDYGDFYFDY

SEQ ID NO: 2237 - protein, 11 aa, Homo sapiens
ARDYGDYYFDY

SEQ ID NO: 2238 - protein, 17 aa, Homo sapiens
ARKPLLYSDFSPGAFDI

SEQ ID NO: 2239 - protein, 17 aa, Homo sapiens
ARKPLLYSNLSPGAFDI

SEQ ID NO: 2240 - protein, 12 aa, Homo sapiens
ARGEGWELPYDY

SEQ ID NO: 2241 - protein, 24 aa, Homo sapiens
ARERPGGTYSNTWYTPTDTNWFDT

SEQ ID NO: 2242 - protein, 15 aa, Homo sapiens
ARGEAVAGTTGFFDY

SEQ ID NO: 2243 - protein, 13 aa, Homo sapiens
VRDGGRPGDAFDI

SEQ ID NO: 2244 - protein, 12 aa, Homo sapiens
AIQLWLRGGYDY

SEQ ID NO: 2245 - protein, 21 aa, Homo sapiens
ARSFRDDPRIAVAGPADAFDI

SEQ ID NO: 2246 - protein, 21 aa, Homo sapiens
ARVEDWGYCSSTNCYSGAFDI

SEQ ID NO: 2247 - protein, 14 aa, Homo sapiens
AREDYYDSSGSFDY

SEQ ID NO: 2248 - protein, 18 aa, Homo sapiens
ARGVNPDDILTGVDAFDI

SEQ ID NO: 2249 - protein, 11 aa, Homo sapiens
ARGDGELFFDQ

SEQ ID NO: 2250 - protein, 11 aa, Homo sapiens
TRWDGWSQHDY

SEQ ID NO: 2251 - protein, 11 aa, Homo sapiens
ARDFYHNWFDP

SEQ ID NO: 2252 - protein, 20 aa, Homo sapiens
ARDPIWFGELLSPPFVHFDY

SEQ ID NO: 2253 - protein, 20 aa, Homo sapiens
ASGYTGYDYFVRGDYYGLDV

SEQ ID NO: 2254 - protein, 20 aa, Homo sapiens
ARANHETTMDTYYYYYYMDV

SEQ ID NO: 2255 - protein, 12 aa, Homo sapiens
AREGMGMAAAGT

SEQ ID NO: 2256 - protein, 22 aa, Homo sapiens
ARAPLFPTGVLAGDYYYYGMDV

SEQ ID NO: 2257 - protein, 13 aa, Homo sapiens
ARESGDTTMAFDY

SEQ ID NO: 2258 - protein, 10 aa, Homo sapiens
ARDLSAAFDI

SEQ ID NO: 2259 - protein, 18 aa, Homo sapiens
AREGARVGATYDTYYFDY

SEQ ID NO: 2260 - protein, 16 aa, Homo sapiens
AAPYCSGGSCSDAFDI

SEQ ID NO: 2261 - protein, 12 aa, Homo sapiens
ARLQWLRGAFDI

SEQ ID NO: 2262 - protein, 18 aa, Homo sapiens
ATAHPRRIQGVFFLGPGV

SEQ ID NO: 2263 - protein, 18 aa, Homo sapiens
ANHPLASGDDYYHYYMDV

SEQ ID NO: 2264 - protein, 13 aa, Homo sapiens
ARSRPTPDWYFDL

SEQ ID NO: 2265 - protein, 15 aa, Homo sapiens
ARVNQAVTTPFSMDV

SEQ ID NO: 2266 - protein, 15 aa, Homo sapiens
ARGGDTAMGPEYFDY

SEQ ID NO: 2267 - protein, 16 aa, Homo sapiens
ARDSDVDTSMVTWFDY

SEQ ID NO: 2268 - protein, 16 aa, Homo sapiens
AKDPLITGPTYQYFHY

SEQ ID NO: 2269 - protein, 12 aa, Homo sapiens
ASSSGYLFHSDY

SEQ ID NO: 2270 - protein, 12 aa, Homo sapiens
AGGTWLRSSFDY

SEQ ID NO: 2271 - protein, 14 aa, Homo sapiens
AKGGAYSYYYYMDV

SEQ ID NO: 2272 - protein, 11 aa, Homo sapiens
ARDLYYYGMDV

SEQ ID NO: 2273 - protein, 17 aa, Homo sapiens
ARADLGYCTNGVCYVDY

SEQ ID NO: 2274 - protein, 23 aa, Homo sapiens
ARDSSEVRDHPGHPGRSVGAFDI

SEQ ID NO: 2275 - protein, 25 aa, Homo sapiens
AREGEVEGYNDFWSGYSRDRYYFDY

SEQ ID NO: 2276 - protein, 25 aa, Homo sapiens
AREGEVEGYYDFWSGYSRDRYYFDY

SEQ ID NO: 2277 - protein, 13 aa, Homo sapiens
ARDVASNYAYFDL

SEQ ID NO: 2278 - protein, 13 aa, Homo sapiens
ARLSDRWYSPFDP

SEQ ID NO: 2279 - protein, 9 aa, Homo sapiens
ARIANYMDV

SEQ ID NO: 2280 - protein, 20 aa, Homo sapiens
ARPTAVAAAGNYFYYYGMDV

SEQ ID NO: 2281 - protein, 13 aa, Homo sapiens
ARERGYDGGKTPP

SEQ ID NO: 2282 - protein, 16 aa, Homo sapiens
ARVGGAHSGYDGSFDY

SEQ ID NO: 2283 - protein, 20 aa, Homo sapiens
AKQAGPYCSGGSCYSAPFDY

SEQ ID NO: 2284 - protein, 11 aa, Homo sapiens
ARDFGEFYFDY

SEQ ID NO: 2285 - protein, 17 aa, Homo sapiens
AKDPFPLAVAGTGYFDY

SEQ ID NO: 2286 - protein, 23 aa, Homo sapiens
ARDSSEVRDHPGHPGRSVGAFDI

SEQ ID NO: 2287 - protein, 15 aa, Homo sapiens
ARDLLDPQLDDAFDI

SEQ ID NO: 2288 - protein, 14 aa, Homo sapiens
VKGVEYSSSSNFDY

SEQ ID NO: 2289 - protein, 11 aa, Homo sapiens
ARDTLGRGGDY

SEQ ID NO: 2290 - protein, 19 aa, Homo sapiens
ARESDCGSTSCYQVGWFDP

SEQ ID NO: 2291 - protein, 17 aa, Homo sapiens
ARGPERGIVGATDYFDY

SEQ ID NO: 2292 - protein, 14 aa, Homo sapiens
AKEPIGQPLLWWDY

SEQ ID NO: 2293 - protein, 12 aa, Homo sapiens
ARGPNLQNWFDP

SEQ ID NO: 2294 - protein, 11 aa, Homo sapiens
ARDLMAYGMDV

SEQ ID NO: 2295 - protein, 11 aa, Homo sapiens
ARDYGDFYFDF

SEQ ID NO: 2296 - protein, 13 aa, Homo sapiens
ARERYFDLGGMDV

SEQ ID NO: 2297 - protein, 13 aa, Homo sapiens
ARDVGRVTTWFDP

SEQ ID NO: 2298 - protein, 15 aa, Homo sapiens
ASEEDYSNYVGWFDP

SEQ ID NO: 2299 - protein, 16 aa, Homo sapiens
ARDRGSSGWYGWYFDL

SEQ ID NO: 2300 - protein, 23 aa, Homo sapiens
AREGYCSGGSCYSGYYYYYGMDV

SEQ ID NO: 2301 - protein, 13 aa, Homo sapiens
ARVLPMYGDYLDY

SEQ ID NO: 2302 - protein, 11 aa, Homo sapiens
ARDLDVYGLDV

SEQ ID NO: 2303 - protein, 13 aa, Homo sapiens
ARGPRYSGTHFDY

SEQ ID NO: 2304 - protein, 13 aa, Homo sapiens
ARGPRYSGTYFDY

SEQ ID NO: 2305 - protein, 13 aa, Homo sapiens
ARGPRYSGTYFDY

SEQ ID NO: 2306 - protein, 17 aa, Homo sapiens
ARDPYGYSSIWDGQGGH

SEQ ID NO: 2307 - protein, 26 aa, Homo sapiens
ARGGYCSDGSCYVQDRLIYYYSGLDV

SEQ ID NO: 2308 - protein, 22 aa, Homo sapiens
ARDRRRRYCTNGVCYRPEEIDY

SEQ ID NO: 2309 - protein, 17 aa, Homo sapiens
ARDPFPGAVAGTGYLQY

SEQ ID NO: 2310 - protein, 16 aa, Homo sapiens
AKSSGSYYYYYYGMDV

SEQ ID NO: 2311 - protein, 13 aa, Homo sapiens
ARLHCGGDCYLDY

SEQ ID NO: 2312 - protein, 20 aa, Homo sapiens
AKGSGSGSYPNYYYYYGMDV

SEQ ID NO: 2313 - protein, 11 aa, Homo sapiens
ARDYGDLYFDY

SEQ ID NO: 2314 - protein, 27 aa, Homo sapiens
AKDQAYYDILTGYLNPPKNYYYYGMDV

SEQ ID NO: 2315 - protein, 14 aa, Homo sapiens
ATAFSIFGVVPPDY

SEQ ID NO: 2316 - protein, 15 aa, Homo sapiens
ARQGDCSTTSCAYDY

SEQ ID NO: 2317 - protein, 14 aa, Homo sapiens
AKDRTGNYYYGMDV

SEQ ID NO: 2318 - protein, 18 aa, Homo sapiens
AKDRYYEFWSGYSNWFDP

SEQ ID NO: 2319 - protein, 18 aa, Homo sapiens
ARVNYYDSSGYPSFHFDY

SEQ ID NO: 2320 - protein, 17 aa, Homo sapiens
AREMPAAMGYYYYGMDV

SEQ ID NO: 2321 - protein, 13 aa, Homo sapiens
AKANKYSSSEFDF

SEQ ID NO: 2322 - protein, 11 aa, Homo sapiens
ARDFGDFYFDY

SEQ ID NO: 2323 - protein, 19 aa, Homo sapiens
ATESWVYGSGSYSSGAFDI

SEQ ID NO: 2324 - protein, 13 aa, Homo sapiens
ARGPRYSGTYFDY

SEQ ID NO: 2325 - protein, 13 aa, Homo sapiens
ARGPRYSGTYFDY

SEQ ID NO: 2326 - protein, 13 aa, Homo sapiens
ARGPRYSGTYFDY

SEQ ID NO: 2327 - protein, 13 aa, Homo sapiens
ARGPRYSGTYFDY

SEQ ID NO: 2328 - protein, 13 aa, Homo sapiens
ARGPRYSGTYFDY

SEQ ID NO: 2329 - protein, 15 aa, Homo sapiens
AVYYYDSGSPGWFDP

SEQ ID NO: 2330 - protein, 18 aa, Homo sapiens
ARDFRYCSSTRCYFWFDP

SEQ ID NO: 2331 - protein, 12 aa, Homo sapiens
ARWYDSTGSIDY

SEQ ID NO: 2332 - protein, 14 aa, Homo sapiens
AKDQGYSYGNYFDY

SEQ ID NO: 2333 - protein, 11 aa, Homo sapiens
ALRNQWDLLVY

SEQ ID NO: 2334 - protein, 14 aa, Mus musculus
ARRGYGSSYTWFAY

SEQ ID NO: 2335 - protein, 15 aa, Homo sapiens
ARVSGYDSSGYWGDY

SEQ ID NO: 2336 - protein, 12 aa, Homo sapiens
ARDGELLGWFDP

SEQ ID NO: 2337 - protein, 17 aa, Homo sapiens
TRVRRLWFGSYYYGMDV

SEQ ID NO: 2338 - protein, 17 aa, Homo sapiens
TRVRRLWFGSYYYGMDV

SEQ ID NO: 2339 - protein, 13 aa, Homo sapiens
ARASVSTITDFDY

SEQ ID NO: 2340 - protein, 13 aa, Homo sapiens
ARASVATITDFDY

SEQ ID NO: 2341 - protein, 14 aa, Homo sapiens
ARPQSGGYYAPLDY

SEQ ID NO: 2342 - protein, 16 aa, Homo sapiens
AKVSATYYYYYYGMDV

SEQ ID NO: 2343 - protein, 19 aa, Homo sapiens
ARDTATYVLLWSGDFNLDY

SEQ ID NO: 2344 - protein, 14 aa, Homo sapiens
ARGHTGNYYYGMDV

SEQ ID NO: 2345 - protein, 20 aa, Homo sapiens
AKGGDSSGWAWDGDNPPTDY

SEQ ID NO: 2346 - protein, 15 aa, Homo sapiens
AMGPFGELLPYYFDY

SEQ ID NO: 2347 - protein, 14 aa, Homo sapiens
AAAPAVMTAGWFDP

SEQ ID NO: 2348 - protein, 10 aa, Homo sapiens
VRGAMAWFDP

SEQ ID NO: 2349 - protein, 14 aa, Homo sapiens
ATQPAAIGGTPPYY

SEQ ID NO: 2350 - protein, 21 aa, Homo sapiens
ARDQGPTYYYGSGSPHYGMDV

SEQ ID NO: 2351 - protein, 20 aa, Homo sapiens
AKGGDSSGWAWDGDNPPTDY

SEQ ID NO: 2352 - protein, 21 aa, Homo sapiens
ATSFPIRGDPSYYYYYYGMDV

SEQ ID NO: 2353 - protein, 12 aa, Homo sapiens
AIYGYYYYGLDV

SEQ ID NO: 2354 - protein, 20 aa, Homo sapiens
AKGGDSSGWAWDGDNPPTDY

SEQ ID NO: 2355 - protein, 13 aa, Homo sapiens
ARPTAGAGGAFDI

SEQ ID NO: 2356 - protein, 14 aa, Homo sapiens
ARTEWLLSDNWFDS

SEQ ID NO: 2357 - protein, 15 aa, Homo sapiens
ARGGLVPAARNAFDI

SEQ ID NO: 2358 - protein, 13 aa, Homo sapiens
ARPTAGAGGAFDT

SEQ ID NO: 2359 - protein, 20 aa, Homo sapiens
ARDLPIKVVVPAADYNWFDP

SEQ ID NO: 2360 - protein, 14 aa, Homo sapiens
AHRRGILTEDAFDI

SEQ ID NO: 2361 - protein, 11 aa, Homo sapiens
ARDLNEHGLDV

SEQ ID NO: 2362 - protein, 15 aa, Homo sapiens
ARGTLIPAHRGAFDI

SEQ ID NO: 2363 - protein, 15 aa, Homo sapiens
ARARPDYYYYYAMDV

SEQ ID NO: 2364 - protein, 16 aa, Homo sapiens
AKAHSTGHQYYYGMDV

SEQ ID NO: 2365 - protein, 23 aa, Homo sapiens
ARVVVLGYGRPNNYYDGRNVWDY

SEQ ID NO: 2366 - protein, 9 aa, Homo sapiens
ARGVVTYDY

SEQ ID NO: 2367 - protein, 17 aa, Homo sapiens
ARGRGYSNYGASYYMDV

SEQ ID NO: 2368 - protein, 14 aa, Homo sapiens
AKGRGAGYTSYMDV

SEQ ID NO: 2369 - protein, 16 aa, Homo sapiens
ARMRTGWPTHGRPDDF

SEQ ID NO: 2370 - protein, 16 aa, Homo sapiens
ARSYDILTGYRDAFDI

SEQ ID NO: 2371 - protein, 16 aa, Homo sapiens
ARVGYSQGYYYYYMDV

SEQ ID NO: 2372 - protein, 16 aa, Homo sapiens
AAPHCNRTSCYDAFDL

SEQ ID NO: 2373 - protein, 18 aa, Homo sapiens
ARVGVSGFKSGSNWYFDL

SEQ ID NO: 2374 - protein, 11 aa, Homo sapiens
ARDLVTYGLDV

SEQ ID NO: 2375 - protein, 22 aa, Homo sapiens
AVIMSPIPRYSGYDWAGGAFDI

SEQ ID NO: 2376 - protein, 20 aa, Homo sapiens
AKNLGPYCSGGTCYSLVGDY

SEQ ID NO: 2377 - protein, 22 aa, Homo sapiens
AVIMSPIPRYSGYDWAGDAFDI

SEQ ID NO: 2378 - protein, 16 aa, Homo sapiens
ARMRSGWPTHGRPDDF

SEQ ID NO: 2379 - protein, 14 aa, Homo sapiens
AKDIIRQGEDGMDV

SEQ ID NO: 2380 - protein, 10 aa, Homo sapiens
VKGLFDWFPL

SEQ ID NO: 2381 - protein, 12 aa, Homo sapiens
ARLGFYYGGADY

SEQ ID NO: 2382 - protein, 15 aa, Homo sapiens
AKGVDYGGKLAYFDS

SEQ ID NO: 2383 - protein, 16 aa, Homo sapiens
ARDIDSGYDPTPVFDY

SEQ ID NO: 2384 - protein, 16 aa, Homo sapiens
ARVLYDSSGFYNWFDP

SEQ ID NO: 2385 - protein, 10 aa, Homo sapiens
ARDFLRWHDL

SEQ ID NO: 2386 - protein, 17 aa, Homo sapiens
ARGRGYSNYGASYYMDV

SEQ ID NO: 2387 - protein, 14 aa, Homo sapiens
ARILVIFTLNWFDP

SEQ ID NO: 2388 - protein, 22 aa, Homo sapiens
TTAGSYYYDTVGPGLPEGKFDY

SEQ ID NO: 2389 - protein, 10 aa, Homo sapiens
ARDFLRWHDL

SEQ ID NO: 2390 - protein, 14 aa, Homo sapiens
AGSPVPPTIVGASY

SEQ ID NO: 2391 - protein, 14 aa, Homo sapiens
ARRGEAAGIWYFDL

SEQ ID NO: 2392 - protein, 18 aa, Homo sapiens
AKEGGSGSLRYYYYGMDV

SEQ ID NO: 2393 - protein, 17 aa, Homo sapiens
ARRSYRSSWYYYYGMDV

SEQ ID NO: 2394 - protein, 14 aa, Homo sapiens
ARSTSGSYYYGMDV

SEQ ID NO: 2395 - protein, 17 aa, Homo sapiens
ARDWAPTYYDMPSAFDI

SEQ ID NO: 2396 - protein, 12 aa, Homo sapiens
ARIGSYPEYFQH

SEQ ID NO: 2397 - protein, 13 aa, Homo sapiens
ARGGSGSYSLFDY

SEQ ID NO: 2398 - protein, 14 aa, Homo sapiens
ARSTSGSYYYGMDV

SEQ ID NO: 2399 - protein, 14 aa, Homo sapiens
ARSTSGSYYYGMDV

SEQ ID NO: 2400 - protein, 11 aa, Homo sapiens
ARDLVTYGLDV

SEQ ID NO: 2401 - protein, 15 aa, Homo sapiens
ARIGHFDSSGYYLDY

SEQ ID NO: 2402 - protein, 12 aa, Homo sapiens
ARLSGSSWDFDY

SEQ ID NO: 2403 - protein, 22 aa, Homo sapiens
ARRRSSSRYSSGWYMYYYYMDV

SEQ ID NO: 2404 - protein, 12 aa, Homo sapiens
ARLSGSSWDFDY

SEQ ID NO: 2405 - protein, 12 aa, Homo sapiens
AHRLWFRDAFDI

SEQ ID NO: 2406 - protein, 12 aa, Homo sapiens
ARVGSSSWYFDY

SEQ ID NO: 2407 - protein, 14 aa, Homo sapiens
ARADTMVRGTYFEY

SEQ ID NO: 2408 - protein, 10 aa, Homo sapiens
ARGGATNFDY

SEQ ID NO: 2409 - protein, 19 aa, Homo sapiens
TKASRYCSSTICYWNWFDP

SEQ ID NO: 2410 - protein, 19 aa, Homo sapiens
AREARSRYFDWLPSYYFDY

SEQ ID NO: 2411 - protein, 22 aa, Homo sapiens
ARRRSSSRYSSGWYMYYYYMDV

SEQ ID NO: 2412 - protein, 20 aa, Homo sapiens
AKGGDGSGWAWDGDNPPTDY

SEQ ID NO: 2413 - protein, 16 aa, Homo sapiens
AAPYCSSISCNDGFDI

SEQ ID NO: 2414 - protein, 17 aa, Homo sapiens
ARPDYSSGWFSYWYFDL

SEQ ID NO: 2415 - protein, 14 aa, Homo sapiens
ATGFAVFGRAAVPY

SEQ ID NO: 2416 - protein, 14 aa, Homo sapiens
ARGSAGNYYYGMDV

SEQ ID NO: 2417 - protein, 14 aa, Homo sapiens
ASALRERGVQLWSV

SEQ ID NO: 2418 - protein, 15 aa, Homo sapiens
ARDQEWFRELFLFDY

SEQ ID NO: 2419 - protein, 21 aa, Homo sapiens
ARVNGNSNWNFGSYYYYYMDV

SEQ ID NO: 2420 - protein, 15 aa, Homo sapiens
ARIGHFDSSGYYLDY

SEQ ID NO: 2421 - protein, 17 aa, Homo sapiens
ARWLQLRSDYYYFGMDV

SEQ ID NO: 2422 - protein, 15 aa, Homo sapiens
ARTSHYDSSGSYFEY

SEQ ID NO: 2423 - protein, 14 aa, Homo sapiens
ARPYTGSYKSYMDV

SEQ ID NO: 2424 - protein, 17 aa, Homo sapiens
ARAPRERLQWGEYYFDY

SEQ ID NO: 2425 - protein, 11 aa, Homo sapiens
AKDGSIAAADY

SEQ ID NO: 2426 - protein, 14 aa, Homo sapiens
ATHRCSGGFCYLAY

SEQ ID NO: 2427 - protein, 21 aa, Homo sapiens
ARDQSQGAYILTGYRGYGMDV

SEQ ID NO: 2428 - protein, 17 aa, Homo sapiens
ARPPQAARIHYYYYMDV

SEQ ID NO: 2429 - protein, 14 aa, Homo sapiens
AKGRGAGYTSYMDV

SEQ ID NO: 2430 - protein, 6 aa, Homo sapiens
ARESTQ

SEQ ID NO: 2431 - protein, 11 aa, Homo sapiens
AHRAVILNFDH

SEQ ID NO: 2432 - protein, 14 aa, Homo sapiens
ARPRSGSYYAYFDY

SEQ ID NO: 2433 - protein, 18 aa, Homo sapiens
AKVGYTISRQWLVGEFDY

SEQ ID NO: 2434 - protein, 14 aa, Homo sapiens
ARRGEAAGIWYFDL

SEQ ID NO: 2435 - protein, 15 aa, Homo sapiens
ARQSRGYSYAWSFDY

SEQ ID NO: 2436 - protein, 17 aa, Homo sapiens
AGSSGEGGLYYYYGMDV

SEQ ID NO: 2437 - protein, 15 aa, Homo sapiens
ARDSGGNYGDSYFDY

SEQ ID NO: 2438 - protein, 14 aa, Homo sapiens
ARGSAGNYYYGMDV

SEQ ID NO: 2439 - protein, 18 aa, Homo sapiens
ARIVLGASGTYPSPGFDP

SEQ ID NO: 2440 - protein, 12 aa, Homo sapiens
AGSPWLRGDIDY

SEQ ID NO: 2441 - protein, 20 aa, Homo sapiens
ARDPSYCSSTRCYTVGWFDP

SEQ ID NO: 2442 - protein, 13 aa, Homo sapiens
ARGHVAAWESCYY

SEQ ID NO: 2443 - protein, 23 aa, Homo sapiens
ARARGPSEQYYDLLTGYYDAFDI

SEQ ID NO: 2444 - protein, 15 aa, Homo sapiens
AQMGPLGSTSSAADY

SEQ ID NO: 2445 - protein, 23 aa, Homo sapiens
AREARYFDWIFEGSDYYYYGMDV

SEQ ID NO: 2446 - protein, 17 aa, Homo sapiens
ARRSYRSSWYYYYGMDV

SEQ ID NO: 2447 - protein, 20 aa, Homo sapiens
IRDYDFWGGYYYHPLRAFDI

SEQ ID NO: 2448 - protein, 11 aa, Homo sapiens
ARHQIVVLFDM

SEQ ID NO: 2449 - protein, 15 aa, Homo sapiens
AITYYYDSSGYWWDD

SEQ ID NO: 2450 - protein, 18 aa, Homo sapiens
AGEEVRGVKLYYYYAMDV

SEQ ID NO: 2451 - protein, 12 aa, Homo sapiens
ARDRGWNYGLDY

SEQ ID NO: 2452 - protein, 16 aa, Homo sapiens
ARDVPTTVTAFTVFTY

SEQ ID NO: 2453 - protein, 14 aa, Homo sapiens
ARVPVMVRGVYFDY

SEQ ID NO: 2454 - protein, 12 aa, Homo sapiens
ARGYGLTYYMDV

SEQ ID NO: 2455 - protein, 16 aa, Homo sapiens
ARMRSGWPTHGRPDDF

SEQ ID NO: 2456 - protein, 17 aa, Homo sapiens
AKNERITMLVVVTLFDY

SEQ ID NO: 2457 - protein, 18 aa, Homo sapiens
ARDPSAYYDILTGYSGDV

SEQ ID NO: 2458 - protein, 16 aa, Homo sapiens
ARDIDSGYDPTPVFDY

SEQ ID NO: 2459 - protein, 16 aa, Homo sapiens
ASRWGDYFDSSGAYDS

SEQ ID NO: 2460 - protein, 20 aa, Homo sapiens
ARDPVWVDGELLSGGIPFDY

SEQ ID NO: 2461 - protein, 21 aa, Homo sapiens
AILWRGSSWADRHYYYYSMDV

SEQ ID NO: 2462 - protein, 10 aa, Homo sapiens
ARDLGRGLDP

SEQ ID NO: 2463 - protein, 10 aa, Homo sapiens
VKGLFDWFPL

SEQ ID NO: 2464 - protein, 14 aa, Homo sapiens
ATGYIGTYYYYMDV

SEQ ID NO: 2465 - protein, 16 aa, Homo sapiens
AKVSSITSLLGYYFDS

SEQ ID NO: 2466 - protein, 9 aa, Homo sapiens
ARGVVTYDY

SEQ ID NO: 2467 - protein, 12 aa, Homo sapiens
ARGDGYRSQFDP

SEQ ID NO: 2468 - protein, 12 aa, Homo sapiens
AHRLWFRDAFDI

SEQ ID NO: 2469 - protein, 21 aa, Homo sapiens
ARVEGDWLLGGPYYHYYGMDV

SEQ ID NO: 2470 - protein, 14 aa, Homo sapiens
ARILVIFTLNWFDP

SEQ ID NO: 2471 - protein, 12 aa, Homo sapiens
ARLGGSSWHFDY

SEQ ID NO: 2472 - protein, 23 aa, Homo sapiens
ARHDGSGEMDTITWGPIYYYMDV

SEQ ID NO: 2473 - protein, 12 aa, Homo sapiens
AHRLWFRDAFDI

SEQ ID NO: 2474 - protein, 12 aa, Homo sapiens
AMGPSAFSWLDP

SEQ ID NO: 2475 - protein, 14 aa, Homo sapiens
ARSTSGSYYYGMDV

SEQ ID NO: 2476 - protein, 15 aa, Homo sapiens
AHRPPSYHGWCYFDY

SEQ ID NO: 2477 - protein, 10 aa, Homo sapiens
ARVQRRRLDY

SEQ ID NO: 2478 - protein, 17 aa, Homo sapiens
ARPPQAARIHYYYYMDV

SEQ ID NO: 2479 - protein, 12 aa, Homo sapiens
ARRFYGPSSFDY

SEQ ID NO: 2480 - protein, 18 aa, Homo sapiens
ARGGEWRIVPGGRDYFDY

SEQ ID NO: 2481 - protein, 24 aa, Homo sapiens
ARLGVSKYCSGGRCLSGGSNWFDP

SEQ ID NO: 2482 - protein, 12 aa, Homo sapiens
ASSSWLRGAFDI

SEQ ID NO: 2483 - protein, 16 aa, Homo sapiens
AAPHCNRTSCYDAFDL

SEQ ID NO: 2484 - protein, 19 aa, Homo sapiens
SRVRGSFYGSVGKNYGMDV

SEQ ID NO: 2485 - protein, 16 aa, Homo sapiens
ARDIDSGYDPTPVFDY

SEQ ID NO: 2486 - protein, 15 aa, Homo sapiens
ARTSHYDSSGSYFEY

SEQ ID NO: 2487 - protein, 15 aa, Homo sapiens
ARRRGGIGIEYGMDV

SEQ ID NO: 2488 - protein, 18 aa, Homo sapiens
AKDFGGDNTAMVEYFFDF

SEQ ID NO: 2489 - protein, 14 aa, Homo sapiens
AGSPVPPTIVGASY

SEQ ID NO: 2490 - protein, 13 aa, Homo sapiens
AKGRGNYLTFFDS

SEQ ID NO: 2491 - protein, 21 aa, Homo sapiens
ARDPGSRYSGGWYDYYYAMDV

SEQ ID NO: 2492 - protein, 9 aa, Homo sapiens
ARRDTDFDY

SEQ ID NO: 2493 - protein, 16 aa, Homo sapiens
AAPYCSRTSCHDAFDI

SEQ ID NO: 2494 - protein, 18 aa, Homo sapiens
AKDLPPYASGWYEGGFDY

SEQ ID NO: 2495 - protein, 13 aa, Homo sapiens
AQGRGGYYSPFDD

SEQ ID NO: 2496 - protein, 16 aa, Homo sapiens
ARTTWGTWIQAWYFDI

SEQ ID NO: 2497 - protein, 17 aa, Homo sapiens
AREGDFWSGYYTGWFDP

SEQ ID NO: 2498 - protein, 17 aa, Homo sapiens
AKDLTIVVIPAAPNFDY

SEQ ID NO: 2499 - protein, 22 aa, Homo sapiens
AKDQARVQDYIWGSYRSYGMDV

SEQ ID NO: 2500 - protein, 14 aa, Homo sapiens
AKDIIRQGEDGMDV

SEQ ID NO: 2501 - protein, 16 aa, Homo sapiens
ARMRSGWPTHGRPDDF

SEQ ID NO: 2502 - protein, 17 aa, Homo sapiens
ARWLQLRSDYYYFGMDV

SEQ ID NO: 2503 - protein, 12 aa, Homo sapiens
ARLSGSSWDFDY

SEQ ID NO: 2504 - protein, 8 aa, Homo sapiens
ARDYRDWI

SEQ ID NO: 2505 - protein, 21 aa, Homo sapiens
AHNRFQYCSSTTCYTLLPFDY

SEQ ID NO: 2506 - protein, 14 aa, Homo sapiens
ARPYTGSYKSYMDV

SEQ ID NO: 2507 - protein, 19 aa, Homo sapiens
ARGDGDVYNFLLVRNWFDP

SEQ ID NO: 2508 - protein, 13 aa, Homo sapiens
ASLWFGDLYSFDY

SEQ ID NO: 2509 - protein, 12 aa, Homo sapiens
ARLGRSSWNFDY

SEQ ID NO: 2510 - protein, 17 aa, Homo sapiens
ARVGGISPYYYYYYMDV

SEQ ID NO: 2511 - protein, 16 aa, Homo sapiens
ARMRSGWPTHGRPDDY

SEQ ID NO: 2512 - protein, 14 aa, Homo sapiens
ASAKLVATISYFDY

SEQ ID NO: 2513 - protein, 13 aa, Homo sapiens
ARVGGYYYYYMDV

SEQ ID NO: 2514 - protein, 8 aa, Homo sapiens
AKPYGMDV

SEQ ID NO: 2515 - protein, 24 aa, Homo sapiens
ARDRSNLERLVMTFGGIIAGAFDI

SEQ ID NO: 2516 - protein, 14 aa, Homo sapiens
ARVNSGSYYSYFDY

SEQ ID NO: 2517 - protein, 16 aa, Homo sapiens
ASRWGDYFDSSGAYDS

SEQ ID NO: 2518 - protein, 11 aa, Homo sapiens
ARKGPLWRFDY

SEQ ID NO: 2519 - protein, 6 aa, Homo sapiens
ARESTQ

SEQ ID NO: 2520 - protein, 19 aa, Homo sapiens
ARAPFQLLDKYYFFYYMDV

SEQ ID NO: 2521 - protein, 10 aa, Homo sapiens
ARHIPAWGYK

SEQ ID NO: 2522 - protein, 17 aa, Homo sapiens
AKLLGSGITLDNDAFDI

SEQ ID NO: 2523 - protein, 15 aa, Homo sapiens
ARIGHFDSSGYYLDY

SEQ ID NO: 2524 - protein, 16 aa, Homo sapiens
AKDFGSGIVGATGFDF

SEQ ID NO: 2525 - protein, 22 aa, Homo sapiens
ARRRSSSRYSSGWYMYYYYMDV

SEQ ID NO: 2526 - protein, 14 aa, Homo sapiens
ATHRCSGGFCYLAY

SEQ ID NO: 2527 - protein, 17 aa, Homo sapiens
ARASYNSNWSIGEYFRD

SEQ ID NO: 2528 - protein, 20 aa, Homo sapiens
AKQGGLYCSGTNCWGGYLDY

SEQ ID NO: 2529 - protein, 11 aa, Homo sapiens
VHRHVSGAFDY

SEQ ID NO: 2530 - protein, 24 aa, Homo sapiens
ARARLLGYCSSTSCYTIGWGAFDI

SEQ ID NO: 2531 - protein, 11 aa, Homo sapiens
AREGQGTYLDY

SEQ ID NO: 2532 - protein, 19 aa, Homo sapiens
AREARSRYFDWLPSYYFDY

SEQ ID NO: 2533 - protein, 15 aa, Homo sapiens
ARDPSPLVLITSIDY

SEQ ID NO: 2534 - protein, 15 aa, Homo sapiens
ARRGNYYDSKNWFDP

SEQ ID NO: 2535 - protein, 13 aa, Homo sapiens
ARGGSGSYSLFDY

SEQ ID NO: 2536 - protein, 16 aa, Homo sapiens
ARVLYDSSGFYNWFDP

SEQ ID NO: 2537 - protein, 18 aa, Homo sapiens
ARDLGDGYNLRVPAYFDL

SEQ ID NO: 2538 - protein, 11 aa, Homo sapiens
ARVDHVNVRDY

SEQ ID NO: 2539 - protein, 21 aa, Homo sapiens
ARVNGNSNWNFGSYYYYYMDV

SEQ ID NO: 2540 - protein, 14 aa, Homo sapiens
AREGQMAATTGIDY

SEQ ID NO: 2541 - protein, 19 aa, Homo sapiens
TTLTYYYDSSAYLNDAFDI

SEQ ID NO: 2542 - protein, 14 aa, Homo sapiens
AKGIYYDIFMPLLD

SEQ ID NO: 2543 - protein, 14 aa, Homo sapiens
ARGVVAATPGWFDP

SEQ ID NO: 2544 - protein, 17 aa, Homo sapiens
ARGWFGELLKGTYWFDP

SEQ ID NO: 2545 - protein, 18 aa, Homo sapiens
ARVGVSGFKSGSNWYFDL

SEQ ID NO: 2546 - protein, 13 aa, Homo sapiens
AREVEQLAHMVDY

SEQ ID NO: 2547 - protein, 15 aa, Homo sapiens
ARQWKWFGEAWYFDL

SEQ ID NO: 2548 - protein, 17 aa, Homo sapiens
ARDPYDLYGDYGGTFDY

SEQ ID NO: 2549 - protein, 22 aa, Homo sapiens
AREDYYGSGSLVDPYYYYRMDV

SEQ ID NO: 2550 - protein, 15 aa, Homo sapiens
VRDLALFEVVIQQGV

SEQ ID NO: 2551 - protein, 19 aa, Homo sapiens
ARHTVDCGGDCFPNDAFDI

SEQ ID NO: 2552 - protein, 23 aa, Homo sapiens
ARVVVLGYGRPNNYYDGRNVWDY

SEQ ID NO: 2553 - protein, 14 aa, Homo sapiens
ARPRGGSYQTCFDY

SEQ ID NO: 2554 - protein, 15 aa, Homo sapiens
ARWGPDYGDYASNDY

SEQ ID NO: 2555 - protein, 22 aa, Homo sapiens
AVIMSPIPRYSGYDWAGDAFDI

SEQ ID NO: 2556 - protein, 10 aa, Homo sapiens
ARGLVGRIDP

SEQ ID NO: 2557 - protein, 15 aa, Homo sapiens
ARDQQIVPHADGFDI

SEQ ID NO: 2558 - protein, 12 aa, Homo sapiens
ARIGSYPEYFQH

SEQ ID NO: 2559 - protein, 14 aa, Homo sapiens
AKDIIRQGEDGMDV

SEQ ID NO: 2560 - protein, 22 aa, Homo sapiens
ARDVGGYSGYDLGFDYYYYMDV

SEQ ID NO: 2561 - protein, 19 aa, Homo sapiens
AKDRTAVFLFFGLGDAFDI

SEQ ID NO: 2562 - protein, 14 aa, Homo sapiens
ASALRERGVQLWSV

SEQ ID NO: 2563 - protein, 16 aa, Homo sapiens
AKDPASGIVGPTHFDY

SEQ ID NO: 2564 - protein, 14 aa, Homo sapiens
ATGFAVFGRAAVPY

SEQ ID NO: 2565 - protein, 19 aa, Homo sapiens
ARFRRSYGSGSYYNISFDY

SEQ ID NO: 2566 - protein, 12 aa, Homo sapiens
VREYGSGHPLPI

SEQ ID NO: 2567 - protein, 12 aa, Homo sapiens
ARATWLRDAFGI

SEQ ID NO: 2568 - protein, 16 aa, Homo sapiens
ARGFHVPAALRNWFDP

SEQ ID NO: 2569 - protein, 17 aa, Homo sapiens
AREANDSGSFYNGPFDY

SEQ ID NO: 2570 - protein, 17 aa, Homo sapiens
ARGGLLWFGGAGNYMDV

SEQ ID NO: 2571 - protein, 16 aa, Homo sapiens
ARMRTGWPTHGRPDDF

SEQ ID NO: 2572 - protein, 18 aa, Homo sapiens
ARGPPVTTFFVFSLLFDP

SEQ ID NO: 2573 - protein, 15 aa, Homo sapiens
AKEGEWELRGNALDI

SEQ ID NO: 2574 - protein, 13 aa, Homo sapiens
AREGQWPNQAFDI

SEQ ID NO: 2575 - protein, 16 aa, Homo sapiens
ASGPPYMATFSYYFDY

SEQ ID NO: 2576 - protein, 17 aa, Homo sapiens
ARDPIRDGVWGLNENDY

SEQ ID NO: 2577 - protein, 18 aa, Homo sapiens
ARSPPASYYNPSTGYFDY

SEQ ID NO: 2578 - protein, 15 aa, Homo sapiens
ARDVFWVPAASSFDY

SEQ ID NO: 2579 - protein, 15 aa, Homo sapiens
ARDQEWFRELFLFDY

SEQ ID NO: 2580 - protein, 16 aa, Homo sapiens
ARMRTGWPTHGRPDDF

SEQ ID NO: 2581 - protein, 19 aa, Homo sapiens
ARGWGWGAVAGRAEYYFDY

SEQ ID NO: 2582 - protein, 14 aa, Homo sapiens
ARAQGGNYYYGMDV

SEQ ID NO: 2583 - protein, 9 aa, Homo sapiens
ARGAASFDY

SEQ ID NO: 2584 - protein, 18 aa, Homo sapiens
ARDPRVVVTARMYNWFDP

SEQ ID NO: 2585 - protein, 18 aa, Homo sapiens
ARDQRQFQLLGRFGWFDP

SEQ ID NO: 2586 - protein, 15 aa, Homo sapiens
ARQWKWFGEAWYFDL

SEQ ID NO: 2587 - protein, 18 aa, Homo sapiens
ARDQDSGYPTYYYYYMDV

SEQ ID NO: 2588 - protein, 21 aa, Homo sapiens
ARGGIYYLVRGFIIGYYGMDV

SEQ ID NO: 2589 - protein, 13 aa, Homo sapiens
TTGGYSSYAASDY

SEQ ID NO: 2590 - protein, 17 aa, Homo sapiens
ARVDYYGSGSVYWYFDL

SEQ ID NO: 2591 - protein, 14 aa, Homo sapiens
AKVGWELSIDAFDL

SEQ ID NO: 2592 - protein, 12 aa, Homo sapiens
AHRLWFRDAFDI

SEQ ID NO: 2593 - protein, 12 aa, Homo sapiens
ARIQYQLNGMDV

SEQ ID NO: 2594 - protein, 23 aa, Homo sapiens
ARGRVGYVGSGSRGYYYYYDMDV

SEQ ID NO: 2595 - protein, 17 aa, Homo sapiens
ARPDYSSGWFSYWYFDL

SEQ ID NO: 2596 - protein, 12 aa, Homo sapiens
ARGRSYGLSLGY

SEQ ID NO: 2597 - protein, 13 aa, Homo sapiens
ARESADISSRLDY

SEQ ID NO: 2598 - protein, 12 aa, Homo sapiens
AHRLWFRDAFDI

SEQ ID NO: 2599 - protein, 14 aa, Homo sapiens
ASVITFGGVIVRSY

SEQ ID NO: 2600 - protein, 15 aa, Homo sapiens
ARVSGYGDYGAYSDY

SEQ ID NO: 2601 - protein, 14 aa, Homo sapiens
ASVITFGGVIVRSY

SEQ ID NO: 2602 - protein, 21 aa, Homo sapiens
ARVEGDWLLGGPYYHYYGMDV

SEQ ID NO: 2603 - protein, 14 aa, Homo sapiens
ARADTMVRGTYFEY

SEQ ID NO: 2604 - protein, 14 aa, Homo sapiens
ARDYCNGVTCNSNY

SEQ ID NO: 2605 - protein, 8 aa, Homo sapiens
ARGWYFDY

SEQ ID NO: 2606 - protein, 17 aa, Homo sapiens
ARVEGEGVDSYYYGMDV

SEQ ID NO: 2607 - protein, 14 aa, Homo sapiens
AKDIIRQGEDGMDV

SEQ ID NO: 2608 - protein, 15 aa, Homo sapiens
ARHPVDGYNYGYSDL

SEQ ID NO: 2609 - protein, 23 aa, Homo sapiens
ARVVVLGYGRPNNYYDGRNVWDY

SEQ ID NO: 2610 - protein, 14 aa, Homo sapiens
ARAGGGSYRGPFDY

SEQ ID NO: 2611 - protein, 14 aa, Homo sapiens
AKSYNGNYYDAFDI

SEQ ID NO: 2612 - protein, 14 aa, Homo sapiens
ARGSAGNYYYGMDV

SEQ ID NO: 2613 - protein, 20 aa, Homo sapiens
ARLTFGGSGSYYFYYNGMDV

SEQ ID NO: 2614 - protein, 19 aa, Homo sapiens
ARADPYQLLGQHYYYGMDV

SEQ ID NO: 2615 - protein, 20 aa, Homo sapiens
AKGGDGSGWAWDGDNPPTDY

SEQ ID NO: 2616 - protein, 18 aa, Homo sapiens
ARIVLGASGTYPSPGFDP

SEQ ID NO: 2617 - protein, 14 aa, Homo sapiens
AKDGSGSYYGWFDP

SEQ ID NO: 2618 - protein, 14 aa, Homo sapiens
ARSCGDCYSADLDF

SEQ ID NO: 2619 - protein, 12 aa, Homo sapiens
ARLLWLRGHFDY

SEQ ID NO: 2620 - protein, 22 aa, Homo sapiens
AVIMSPIPRYSGYDWAGGAFDI

SEQ ID NO: 2621 - protein, 10 aa, Homo sapiens
ARALNKGFDP

SEQ ID NO: 2622 - protein, 16 aa, Homo sapiens
AAPHCNRTSCYDAFDL

SEQ ID NO: 2623 - protein, 20 aa, Homo sapiens
ARDRLGDGSYLGGGYYGMDV

SEQ ID NO: 2624 - protein, 16 aa, Homo sapiens
ARMRSGWPTHGRPDDL

SEQ ID NO: 2625 - protein, 20 aa, Homo sapiens
ARDHSGYYDSTSLMSPFFDY

SEQ ID NO: 2626 - protein, 17 aa, Homo sapiens
ARDLAGVPAALGCWFDP

SEQ ID NO: 2627 - protein, 20 aa, Homo sapiens
AKNLGPYCSGGTCYSLVGDY

SEQ ID NO: 2628 - protein, 13 aa, Homo sapiens
ARARGGYNWNFDY

SEQ ID NO: 2629 - protein, 13 aa, Homo sapiens
ARDQGTVVTHFDY

SEQ ID NO: 2630 - protein, 20 aa, Homo sapiens
AKNLGPYCSGGTCYSLVGDY

SEQ ID NO: 2631 - protein, 16 aa, Homo sapiens
ARMRSGWPTHGRPDDH

SEQ ID NO: 2632 - protein, 20 aa, Homo sapiens
AKDEMAYPPSHHYYYYYMDV

SEQ ID NO: 2633 - protein, 16 aa, Homo sapiens
ARGPSILTGFYNPLDY

SEQ ID NO: 2634 - protein, 22 aa, Homo sapiens
ARRTYYDLWSAYSSTAYYCMDV

SEQ ID NO: 2635 - protein, 15 aa, Homo sapiens
ARLSGSGWLGYAMDV

SEQ ID NO: 2636 - protein, 10 aa, Homo sapiens
ARPSNWYFDL

SEQ ID NO: 2637 - protein, 20 aa, Homo sapiens
AKAGYYAYVWGSYRFEYFDN

SEQ ID NO: 2638 - protein, 11 aa, Homo sapiens
ARGPEPDAFDI

SEQ ID NO: 2639 - protein, 14 aa, Homo sapiens
AGSPVPPTIVGASY

SEQ ID NO: 2640 - protein, 20 aa, Homo sapiens
ARDLSTTWYLEMWGPDAFDI

SEQ ID NO: 2641 - protein, 20 aa, Homo sapiens
AKKGGPYCGGGNCYAGYFDY

SEQ ID NO: 2642 - protein, 16 aa, Homo sapiens
ARVGYSQGYYYYYMDV

SEQ ID NO: 2643 - protein, 20 aa, Homo sapiens
ARDYCSSTTCPAETYYYMDV

SEQ ID NO: 2644 - protein, 10 aa, Homo sapiens
ARDFLRWHDL

SEQ ID NO: 2645 - protein, 14 aa, Homo sapiens
ARVDFDILTGYYSN

SEQ ID NO: 2646 - protein, 15 aa, Homo sapiens
AKWAGPIVMKYYLQY

SEQ ID NO: 2647 - protein, 17 aa, Homo sapiens
ARGGDSGYDLGAWYFDL

SEQ ID NO: 2648 - protein, 12 aa, Homo sapiens
ARTPTLYNWFHP

SEQ ID NO: 2649 - protein, 12 aa, Homo sapiens
ARATTFFYGMDV

SEQ ID NO: 2650 - protein, 17 aa, Homo sapiens
ARHQRYCSSSSCHVWDY

SEQ ID NO: 2651 - protein, 14 aa, Homo sapiens
AKGRGAGYTSYMDV

SEQ ID NO: 2652 - protein, 16 aa, Homo sapiens
ARSYDILTGYRDAFDI

SEQ ID NO: 2653 - protein, 22 aa, Homo sapiens
ARDDNSPQGSGWYFYYYYAMDV

SEQ ID NO: 2654 - protein, 17 aa, Homo sapiens
ARDWAPTYYDMPSAFDI

SEQ ID NO: 2655 - protein, 12 aa, Homo sapiens
VRLGVSSWYFDY

SEQ ID NO: 2656 - protein, 26 aa, Homo sapiens
ARVVVEVATNKGIHGVDYYYYYYMDV

SEQ ID NO: 2657 - protein, 15 aa, Homo sapiens
ARLRYSSSGGHIFDY

SEQ ID NO: 2658 - protein, 18 aa, Homo sapiens
ARGLTGSSAYKDEIYFDY

SEQ ID NO: 2659 - protein, 21 aa, Homo sapiens
ARDGGNAYSSGWYRYYYHMDV

SEQ ID NO: 2660 - protein, 16 aa, Homo sapiens
ARVLYDSSGFYNWFDP

SEQ ID NO: 2661 - protein, 16 aa, Homo sapiens
ARGFHVPAALRNWFDP

SEQ ID NO: 2662 - protein, 16 aa, Homo sapiens
ARSYDILTGYRDAFDI

SEQ ID NO: 2663 - protein, 17 aa, Homo sapiens
ARVNDGRPNPLEYYFDY

SEQ ID NO: 2664 - protein, 16 aa, Homo sapiens
ARETYSAYEMPPYFDY

SEQ ID NO: 2665 - protein, 21 aa, Homo sapiens
ARDLIIESTIAARPGYYGMDV

SEQ ID NO: 2666 - protein, 12 aa, Homo sapiens
ARERSGTYFFDY

SEQ ID NO: 2667 - protein, 11 aa, Homo sapiens
ARETPVTAIDY

SEQ ID NO: 2668 - protein, 16 aa, Homo sapiens
AAPYCSSISCNDGFDI

SEQ ID NO: 2669 - protein, 16 aa, Homo sapiens
ASMTRMSEQTYYGMDV

SEQ ID NO: 2670 - protein, 8 aa, Homo sapiens
ARELMSVG

SEQ ID NO: 2671 - protein, 17 aa, Homo sapiens
ARDALYYNGPGRDGMDV

SEQ ID NO: 2672 - protein, 17 aa, Homo sapiens
ARDALYYNGPGRDGMDV

SEQ ID NO: 2673 - protein, 19 aa, Homo sapiens
AKDMVEPLFSHYYYYGMDV

SEQ ID NO: 2674 - protein, 17 aa, Homo sapiens
ARAPRERLQWGEYYFDY

SEQ ID NO: 2675 - protein, 22 aa, Homo sapiens
ARVFETKVIRGGRYYYYYYMDV

SEQ ID NO: 2676 - protein, 16 aa, Homo sapiens
ARCRQMGNFYYYYMDV

SEQ ID NO: 2677 - protein, 15 aa, Homo sapiens
ARVVPTRGPVAWFDP

SEQ ID NO: 2678 - protein, 21 aa, Homo sapiens
ARDQSQGAYILTGYRGYGMDV

SEQ ID NO: 2679 - protein, 17 aa, Homo sapiens
TTTQGGDYGDNLYYLDY

SEQ ID NO: 2680 - protein, 11 aa, Homo sapiens
ARGPEPDAFDI

SEQ ID NO: 2681 - protein, 16 aa, Homo sapiens
ARGYGFVPNVLYYFDY

SEQ ID NO: 2682 - protein, 13 aa, Homo sapiens
ARGGSILWWLIDY

SEQ ID NO: 2683 - protein, 16 aa, Homo sapiens
AKDSRSGIAGVDAFDI

SEQ ID NO: 2684 - protein, 13 aa, Homo sapiens
ARGDGGYYSPFDY

SEQ ID NO: 2685 - protein, 19 aa, Homo sapiens
AHRLPTPQLLPSFENWFDP

SEQ ID NO: 2686 - protein, 10 aa, Homo sapiens
AREVVGYFDC

SEQ ID NO: 2687 - protein, 12 aa, Homo sapiens
ARLRWLRGGIDF

SEQ ID NO: 2688 - protein, 16 aa, Homo sapiens
ARGYGFVPNVLYYFDY

SEQ ID NO: 2689 - protein, 14 aa, Homo sapiens
ARAQGGNYYYGMDV

SEQ ID NO: 2690 - protein, 25 aa, Homo sapiens
ARDLAYHPYRDYGDDDYYYYYGMDV

SEQ ID NO: 2691 - protein, 15 aa, Homo sapiens
ARGAIPPNSRAEIDY

SEQ ID NO: 2692 - protein, 21 aa, Homo sapiens
ARENDYGDYVEPRDYYYGMDV

SEQ ID NO: 2693 - protein, 17 aa, Homo sapiens
AREGPFGDREASGAFDV

SEQ ID NO: 2694 - protein, 13 aa, Homo sapiens
TGVVAAPAEYFQH

SEQ ID NO: 2695 - protein, 12 aa, Homo sapiens
ARLGFYYGGADY

SEQ ID NO: 2696 - protein, 11 aa, Homo sapiens
AKDGSIAAADY

SEQ ID NO: 2697 - protein, 14 aa, Homo sapiens
ARGAAVPAAGEFDY

SEQ ID NO: 2698 - protein, 14 aa, Homo sapiens
AKGDGSYLMDYFDY

SEQ ID NO: 2699 - protein, 16 aa, Homo sapiens
ARSYDILTGYRDAFDI

SEQ ID NO: 2700 - protein, 16 aa, Homo sapiens
ARCRQMGNFYYYYMDV

SEQ ID NO: 2701 - protein, 18 aa, Homo sapiens
ARLGSESKIDYYYYGMDV

SEQ ID NO: 2702 - protein, 17 aa, Homo sapiens
ARGRGYSNYGASYYMDV

SEQ ID NO: 2703 - protein, 15 aa, Homo sapiens
ARMSRGYNYAYTFDI

SEQ ID NO: 2704 - protein, 12 aa, Homo sapiens
ARTMATINAFDI

SEQ ID NO: 2705 - protein, 10 aa, Homo sapiens
ARGGATNFDY

SEQ ID NO: 2706 - protein, 11 aa, Homo sapiens
ARPGKAAAFDY

SEQ ID NO: 2707 - protein, 21 aa, Homo sapiens
ARDLHQDWVVVVAANVYGMDV

SEQ ID NO: 2708 - protein, 16 aa, Homo sapiens
AAPYCSSISCNDGFDI

SEQ ID NO: 2709 - protein, 12 aa, Homo sapiens
ARATTFFYGMDV

SEQ ID NO: 2710 - protein, 20 aa, Homo sapiens
AKKGGPYCGGGNCYAGYFDY

SEQ ID NO: 2711 - protein, 20 aa, Homo sapiens
AKLDVGGYDFVSGHYYAFDI

SEQ ID NO: 2712 - protein, 21 aa, Homo sapiens
ARGLISLFRGAIFHYYYGMDV

SEQ ID NO: 2713 - protein, 11 aa, Homo sapiens
ARDLVTYGLDV

SEQ ID NO: 2714 - protein, 19 aa, Homo sapiens
AHSGPPDLSPVLSQGWFDP

SEQ ID NO: 2715 - protein, 22 aa, Homo sapiens
AKGGPNKEVLYFGELLDYGMDV

SEQ ID NO: 2716 - protein, 10 aa, Homo sapiens
ARVQRRRLDY

SEQ ID NO: 2717 - protein, 16 aa, Homo sapiens
AAPYCSSISCNDGFDI

SEQ ID NO: 2718 - protein, 15 aa, Homo sapiens
ARGAIPPNSRAEIDY

SEQ ID NO: 2719 - protein, 20 aa, Homo sapiens
ARDLSTTWYLEMWGPDAFDI

SEQ ID NO: 2720 - protein, 16 aa, Homo sapiens
ARVLYDSSGFYNWFDP

SEQ ID NO: 2721 - protein, 20 aa, Homo sapiens
AKNLGPYCSGGTCYSLVGDY

SEQ ID NO: 2722 - protein, 16 aa, Homo sapiens
AAPYCSSISCNDGFDI

SEQ ID NO: 2723 - protein, 20 aa, Homo sapiens
AKDEMAYPPSHHYYYYYMDV

SEQ ID NO: 2724 - protein, 23 aa, Homo sapiens
ARLVTTVTTANGLYYYSYYYMDV

SEQ ID NO: 2725 - protein, 14 aa, Homo sapiens
ARDRSGNYRDAFDI

SEQ ID NO: 2726 - protein, 14 aa, Homo sapiens
ARVSSGYYFTPFDY

SEQ ID NO: 2727 - protein, 14 aa, Homo sapiens
ARARGGSYNDAFDI

SEQ ID NO: 2728 - protein, 28 aa, Homo sapiens
AKDGQYYDFWSGYLGARTNPHYYYYMDV

SEQ ID NO: 2729 - protein, 17 aa, Homo sapiens
AKDMGEAVAGTHYGMDV

SEQ ID NO: 2730 - protein, 15 aa, Homo sapiens
ARVGAYDSSGYSNDY

SEQ ID NO: 2731 - protein, 14 aa, Homo sapiens
AREDYYDSSGSFDY

SEQ ID NO: 2732 - protein, 16 aa, Homo sapiens
ARHSQGWLQQAVAFDI

SEQ ID NO: 2733 - protein, 21 aa, Homo sapiens
ARGGYYYDPSGYYSRSFSFDY

SEQ ID NO: 2734 - protein, 15 aa, Homo sapiens
ARDLVWATVSGTMDV

SEQ ID NO: 2735 - protein, 22 aa, Homo sapiens
ARPPRNYYDRSGYYQRAEYFQH

SEQ ID NO: 2736 - protein, 12 aa, Homo sapiens
ARVEWAAAGTFY

SEQ ID NO: 2737 - protein, 20 aa, Homo sapiens
ARWKSDYYDSSGYYPAAFDI

SEQ ID NO: 2738 - protein, 22 aa, Homo sapiens
AGDQNLYCSGDSCYYHYYGMDV

SEQ ID NO: 2739 - protein, 26 aa, Homo sapiens
ARDSEYYDILTGYLAPTHYYYYYMDV

SEQ ID NO: 2740 - protein, 20 aa, Homo sapiens
ARDLVDTAMVQTLDDYGMDV

SEQ ID NO: 2741 - protein, 15 aa, Homo sapiens
ARYYYDSRGYTSIDF

SEQ ID NO: 2742 - protein, 21 aa, Homo sapiens
ARLNYDFWSGYYSYALYYMDV

SEQ ID NO: 2743 - protein, 16 aa, Homo sapiens
ARQQLDYYDSSGCFDY

SEQ ID NO: 2744 - protein, 13 aa, Homo sapiens
ARAMGSYRSPFDY

SEQ ID NO: 2745 - protein, 14 aa, Homo sapiens
ARGGDRYPVGYFDL

SEQ ID NO: 2746 - protein, 15 aa, Homo sapiens
ARRSTSRWGYYYMDV

SEQ ID NO: 2747 - protein, 18 aa, Homo sapiens
AREANSDFWSGYLGYFDY

SEQ ID NO: 2748 - protein, 12 aa, Homo sapiens
ARDLERAGGMDV

SEQ ID NO: 2749 - protein, 20 aa, Homo sapiens
ARHMRPSIAARPGYQYYMDV

SEQ ID NO: 2750 - protein, 9 aa, Homo sapiens
AREAYGMDV

SEQ ID NO: 2751 - protein, 18 aa, Homo sapiens
AKGLRGQQLVIPTEYFQH

SEQ ID NO: 2752 - protein, 19 aa, Homo sapiens
ARGPRGCSSTSCYGSYFDY

SEQ ID NO: 2753 - protein, 20 aa, Homo sapiens
ARDQPLPDILTGYYTGPLDY

SEQ ID NO: 2754 - protein, 12 aa, Homo sapiens
ARDLDTMGGMDV

SEQ ID NO: 2755 - protein, 15 aa, Homo sapiens
ARVRYYDSSGYYEDY

SEQ ID NO: 2756 - protein, 22 aa, Homo sapiens
AKDTGYCGDDCYIKLIRGGPDY

SEQ ID NO: 2757 - protein, 16 aa, Homo sapiens
ASSDSSGFVGSRGFDY

SEQ ID NO: 2758 - protein, 13 aa, Homo sapiens
ASFGDDSGDEGVR

SEQ ID NO: 2759 - protein, 15 aa, Homo sapiens
ARVYSYDSSGYYLEY

SEQ ID NO: 2760 - protein, 17 aa, Homo sapiens
ASPLLLTPPDYYYYMDV

SEQ ID NO: 2761 - protein, 20 aa, Homo sapiens
ARGPRYCSSTSCYAGVYFDY

SEQ ID NO: 2762 - protein, 20 aa, Homo sapiens
ARDGFGDVEEMATIKDAFDI

SEQ ID NO: 2763 - protein, 20 aa, Homo sapiens
ARPNPAGGYDSSGWVDAFDI

SEQ ID NO: 2764 - protein, 16 aa, Homo sapiens
ATGPTIAAAATNWFDP

SEQ ID NO: 2765 - protein, 16 aa, Homo sapiens
TTDRGDSYGYYYCMDV

SEQ ID NO: 2766 - protein, 17 aa, Homo sapiens
AKDKAPPCSSGWYYFDY

SEQ ID NO: 2767 - protein, 20 aa, Homo sapiens
ARGVEDPVVPAAIPWCWFDP

SEQ ID NO: 2768 - protein, 18 aa, Homo sapiens
ASLPVVPAAIGPLPAFDI

SEQ ID NO: 2769 - protein, 23 aa, Homo sapiens
RKMLTIFGKVNQTMLLISGAKGQ

SEQ ID NO: 2770 - protein, 15 aa, Homo sapiens
ARTHSYDNSGQYFDY

SEQ ID NO: 2771 - protein, 20 aa, Homo sapiens
ARLKVITIFGVVRDDYGMDV

SEQ ID NO: 2772 - protein, 14 aa, Homo sapiens
ARSASGSYYGAFDY

SEQ ID NO: 2773 - protein, 14 aa, Homo sapiens
ATSPAVMSVGWVDP

SEQ ID NO: 2774 - protein, 15 aa, Homo sapiens
ARQVRQWLEDDAFDI

SEQ ID NO: 2775 - protein, 17 aa, Homo sapiens
ARAHVDTAMVESGAFDI

SEQ ID NO: 2776 - protein, 15 aa, Homo sapiens
AGRYCSGGRCGWFDP

SEQ ID NO: 2777 - protein, 24 aa, Homo sapiens
ARVQKDIVVVPVALADYYYYGMDV

SEQ ID NO: 2778 - protein, 19 aa, Homo sapiens
ARFDYGYPYSSWSVLSIDY

SEQ ID NO: 2779 - protein, 15 aa, Homo sapiens
AREGSRQWLVIYFDY

SEQ ID NO: 2780 - protein, 24 aa, Homo sapiens
ARGDGDYYDSSGYYRPTLYNWLDP

SEQ ID NO: 2781 - protein, 12 aa, Homo sapiens
ARHPSGLYQLLN

SEQ ID NO: 2782 - protein, 21 aa, Homo sapiens
AKVATYYYDRSGYYYGGALDY

SEQ ID NO: 2783 - protein, 14 aa, Homo sapiens
ARGPAATYYYYMDV

SEQ ID NO: 2784 - protein, 12 aa, Homo sapiens
AKEIAVAGCFDY

SEQ ID NO: 2785 - protein, 22 aa, Homo sapiens
ARVGSVKSTAGYDFWSGDPFDY

SEQ ID NO: 2786 - protein, 16 aa, Homo sapiens
ATAYSVDTAMVRGVGY

SEQ ID NO: 2787 - protein, 18 aa, Homo sapiens
ARDAPDYYDSSGPTYFDY

SEQ ID NO: 2788 - protein, 20 aa, Homo sapiens
AKMGPDPAHDYGRKNDAFDI

SEQ ID NO: 2789 - protein, 16 aa, Homo sapiens
AKAEPEVGGYDYYMDV

SEQ ID NO: 2790 - protein, 14 aa, Homo sapiens
ARGPAATYYYYMDV

SEQ ID NO: 2791 - protein, 16 aa, Homo sapiens
ARRGYTYGADFYGLDV

SEQ ID NO: 2792 - protein, 12 aa, Homo sapiens
AGGSGISTPMDV

SEQ ID NO: 2793 - protein, 11 aa, Homo sapiens
ARDLSEGGMDV

SEQ ID NO: 2794 - protein, 18 aa, Homo sapiens
ATRKETTVTTSLVYGMDV

SEQ ID NO: 2795 - protein, 17 aa, Homo sapiens
AREVMVRGALPPYGMDV

SEQ ID NO: 2796 - protein, 18 aa, Homo sapiens
ARGPFYYDNSGTLGGLDV

SEQ ID NO: 2797 - protein, 12 aa, Homo sapiens
ARDGVIPPRFDY

SEQ ID NO: 2798 - protein, 18 aa, Homo sapiens
ARGPYYYDSSGSLGAFDI

SEQ ID NO: 2799 - protein, 15 aa, Homo sapiens
AGSDNYGFPYNGMDV

SEQ ID NO: 2800 - protein, 15 aa, Homo sapiens
ARDSRFSYVNGEFDY

SEQ ID NO: 2801 - protein, 22 aa, Homo sapiens
ARVGWYDFGTPGDYYYYYGMDV

SEQ ID NO: 2802 - protein, 22 aa, Homo sapiens
ARVFGPGLDCSSTSCYTYGMDV

SEQ ID NO: 2803 - protein, 18 aa, Homo sapiens
VRGPFYYDSSGPLGGMDV

SEQ ID NO: 2804 - protein, 16 aa, Homo sapiens
AAPYCSSTNCYDAFDI

SEQ ID NO: 2805 - protein, 18 aa, Homo sapiens
AKDFLWDLHPPRYYGMDV

SEQ ID NO: 2806 - protein, 17 aa, Homo sapiens
ARTPLSLRLRYNWYFDL

SEQ ID NO: 2807 - protein, 6 aa, Homo sapiens
ARGFDY

SEQ ID NO: 2808 - protein, 10 aa, Homo sapiens
ARETTGHFDY

SEQ ID NO: 2809 - protein, 13 aa, Homo sapiens
VRGGVSGPNSFDM

SEQ ID NO: 2810 - protein, 15 aa, Homo sapiens
ARASARPGVATNLDF

SEQ ID NO: 2811 - protein, 19 aa, Homo sapiens
ARDFNSYQLLWYYYYGMDV

SEQ ID NO: 2812 - protein, 18 aa, Homo sapiens
ARQSSFYSSGWYSYGMDV

SEQ ID NO: 2813 - protein, 17 aa, Homo sapiens
ARVDYGSGSYGWGWFDP

SEQ ID NO: 2814 - protein, 15 aa, Homo sapiens
ATTSPIVGAITWFDP

SEQ ID NO: 2815 - protein, 20 aa, Homo sapiens
AREYYYDSSVYPYYYYAMDV

SEQ ID NO: 2816 - protein, 12 aa, Homo sapiens
ARVRGSYYLFDY

SEQ ID NO: 2817 - protein, 18 aa, Homo sapiens
TTDRVYDYIWGSYRYLDY

SEQ ID NO: 2818 - protein, 21 aa, Homo sapiens
ARDRESYDILTGYSMEGCFDY

SEQ ID NO: 2819 - protein, 19 aa, Homo sapiens
ARVWGYCSGGSCYVDAFDI

SEQ ID NO: 2820 - protein, 15 aa, Homo sapiens
ATAPPYSPPSSWFDP

SEQ ID NO: 2821 - protein, 22 aa, Homo sapiens
ARDHHYDFWSGYSSYYYYGMDV

SEQ ID NO: 2822 - protein, 27 aa, Homo sapiens
ARDEAYYDILTGYINAPKNYYYYGMDV

SEQ ID NO: 2823 - protein, 14 aa, Homo sapiens
ARSFGGSYYYGMDV

SEQ ID NO: 2824 - protein, 15 aa, Homo sapiens
ARASARPGVATNLDF

SEQ ID NO: 2825 - protein, 12 aa, Homo sapiens
ARDLDVSGGMDV

SEQ ID NO: 2826 - protein, 15 aa, Homo sapiens
ATAPPYSPPSSWFDP

SEQ ID NO: 2827 - protein, 15 aa, Homo sapiens
AREARDYYGSGSLDY

SEQ ID NO: 2828 - protein, 16 aa, Homo sapiens
ARDSVAGIYYYYGMDV

SEQ ID NO: 2829 - protein, 14 aa, Homo sapiens
ARSYGGSYYYGMDV

SEQ ID NO: 2830 - protein, 17 aa, Homo sapiens
ARTPLSLRLRYNWYFDL

SEQ ID NO: 2831 - protein, 18 aa, Homo sapiens
ARDLTTTAGTDYYYGMDV

SEQ ID NO: 2832 - protein, 21 aa, Homo sapiens
ARARVAYDYIWGSYRYKAFDY

SEQ ID NO: 2833 - protein, 14 aa, Homo sapiens
ARAQTAHYSSSFDY

SEQ ID NO: 2834 - protein, 13 aa, Homo sapiens
ARGGRLADAAGDY

SEQ ID NO: 2835 - protein, 10 aa, Homo sapiens
ARGHYDLFDY

SEQ ID NO: 2836 - protein, 16 aa, Homo sapiens
ARIRGVYSSGWIGGDY

SEQ ID NO: 2837 - protein, 15 aa, Homo sapiens
ARGDGWDNYYYGMDV

SEQ ID NO: 2838 - protein, 11 aa, Homo sapiens
ARGFGDYYFDY

SEQ ID NO: 2839 - protein, 13 aa, Homo sapiens
VRGGVSGPNAFDI

SEQ ID NO: 2840 - protein, 14 aa, Homo sapiens
ARSISGSYLGAFDY

SEQ ID NO: 2841 - protein, 16 aa, Homo sapiens
ARVGLWWLGHPDAFDI

SEQ ID NO: 2842 - protein, 14 aa, Homo sapiens
ARTKGGSYFAPFDY

SEQ ID NO: 2843 - protein, 15 aa, Homo sapiens
ARDRGYAATFGVFDY

SEQ ID NO: 2844 - protein, 10 aa, Homo sapiens
ARVTVVHFDY

SEQ ID NO: 2845 - protein, 20 aa, Homo sapiens
ARDLTSTSSSPYSYYYGMDV

SEQ ID NO: 2846 - protein, 22 aa, Homo sapiens
ARVTVEAIFGVVILPLKNWFDP

SEQ ID NO: 2847 - protein, 13 aa, Homo sapiens
VRGGVSGPNSFDM

SEQ ID NO: 2848 - protein, 16 aa, Homo sapiens
ARVGLWWLGHPDVFDI

SEQ ID NO: 2849 - protein, 18 aa, Homo sapiens
ARDLVEDTAMVTGAAAGT

SEQ ID NO: 2850 - protein, 17 aa, Homo sapiens
ARAGRRYSSSDDGAFDI

SEQ ID NO: 2851 - protein, 17 aa, Homo sapiens
ARDIMFGDDWLQKQPDY

SEQ ID NO: 2852 - protein, 14 aa, Homo sapiens
ARSISGSYLGAFDY

SEQ ID NO: 2853 - protein, 25 aa, Homo sapiens
ARLVPTWASYYDFWSGYPGGYGMDV

SEQ ID NO: 2854 - protein, 17 aa, Homo sapiens
ATHIVVVTATPNWYFDL

SEQ ID NO: 2855 - protein, 14 aa, Homo sapiens
AKDGGKLWVYYFDY

SEQ ID NO: 2856 - protein, 15 aa, Homo sapiens
ARDRSWAVVYYYMDV

SEQ ID NO: 2857 - protein, 31 aa, Homo sapiens
ARATTDCSSTSCWSLDFWSGYYTGGREKIFD

SEQ ID NO: 2858 - protein, 11 aa, Homo sapiens
ARSLRGANLVP

SEQ ID NO: 2859 - protein, 11 aa, Homo sapiens
ARSLRGANLVP

SEQ ID NO: 2860 - protein, 20 aa, Lama pocos
ARTENVRSLLSDYATWPYDY

SEQ ID NO: 2861 - protein, 20 aa, Lama pocos
AQTHYVSYLLSDYATWPYDY

SEQ ID NO: 2862 - protein, 19 aa, Homo sapiens
ARVPYCSSTSCHRDWYFDL

SEQ ID NO: 2863 - protein, 19 aa, Homo sapiens
ARAARRPVVTDTMAYYMDV

SEQ ID NO: 2864 - protein, 16 aa, Homo sapiens
AAPHCSSTICYDGFDI

SEQ ID NO: 2865 - protein, 13 aa, Homo sapiens
AKGGDYEWELLES

SEQ ID NO: 2866 - protein, 11 aa, Homo sapiens
ARDFGDFFFDY

SEQ ID NO: 2867 - protein, 11 aa, Homo sapiens
ARDYGDYFFDY

SEQ ID NO: 2868 - protein, 16 aa, Homo sapiens
AAPYCSSTRCYDAFDI

SEQ ID NO: 2869 - protein, 18 aa, Homo sapiens
AKDINYDSGGYHKNYFDY

SEQ ID NO: 2870 - protein, 18 aa, Lama pocos
AAAEWGYEWPLYYASSWY

SEQ ID NO: 2871 - protein, 18 aa, Lama pocos
AAAYWGWDWPLNSQDYWY

SEQ ID NO: 2872 - protein, 18 aa, Lama pocos
AAADWGYNWPLIREEYEY

SEQ ID NO: 2873 - protein, 18 aa, Lama pocos
AAADWGYNIPLNITDYWY

SEQ ID NO: 2874 - protein, 18 aa, Lama pocos
AAAMNGYNEPLYSYDYEY

SEQ ID NO: 2875 - protein, 18 aa, Lama pocos
AAASWGYEWPLVYDDYWY

SEQ ID NO: 2876 - protein, 18 aa, Lama pocos
AAATWGYHWPLGAWDYWY

SEQ ID NO: 2877 - protein, 18 aa, Lama pocos
AAATWGYSWPLEHDEYWY

SEQ ID NO: 2878 - protein, 18 aa, Lama pocos
AAAFHGEQYPLYTNKYHY

SEQ ID NO: 2879 - protein, 18 aa, Lama pocos
AAANYGANFPLQANTYFY

SEQ ID NO: 2880 - protein, 17 aa, Homo sapiens
ARDFSGHTAVAGTGFEY

SEQ ID NO: 2881 - protein, 17 aa, Homo sapiens
VRASPPGGNTGWPFFED

SEQ ID NO: 2882 - protein, 16 aa, Homo sapiens
ARDNALQNAQIGYLDY

SEQ ID NO: 2883 - protein, 22 aa, Homo sapiens
VLDSDPYTATFSHNHYWYAMDV

SEQ ID NO: 2884 - protein, 19 aa, Homo sapiens
ARDPSIHYTGNHHWYDLDI

SEQ ID NO: 2885 - protein, 17 aa, Homo sapiens
AREEHYDFSSGYFRPAY

SEQ ID NO: 2886 - protein, 23 aa, Homo sapiens
ARGMTSPVVHLYSSGRPSRWFDF

SEQ ID NO: 2887 - protein, 21 aa, Homo sapiens
ARSFISFDSSGHPYYYYAMDV

SEQ ID NO: 2888 - protein, 16 aa, Homo sapiens
ARDNALQNAQIGYLDY

SEQ ID NO: 2889 - protein, 19 aa, Homo sapiens
ARDPSILNTGNHHWYDLDM

SEQ ID NO: 2890 - protein, 19 aa, Homo sapiens
ARDPTFLNSGNHFWYDVDI

SEQ ID NO: 2891 - protein, 19 aa, Homo sapiens
ARDASFPNTGNHFWYDFDL

SEQ ID NO: 2892 - protein, 19 aa, Homo sapiens
AKKGSPYCGVDCYKGYFDY

SEQ ID NO: 2893 - protein, 9 aa, Homo sapiens
ARVGSGRVY

SEQ ID NO: 2894 - protein, 23 aa, Homo sapiens
ARVRIGASHHNFWSGYYTDAFDI

SEQ ID NO: 2895 - protein, 21 aa, Homo sapiens
ARAPLASCSGGRCPTYNRFDL

SEQ ID NO: 2896 - protein, 18 aa, Homo sapiens
ASEYFDGRSYHSFCGLDV

SEQ ID NO: 2897 - protein, 16 aa, Homo sapiens
AKGLSFYGSGSDAFDV

SEQ ID NO: 2898 - protein, 17 aa, Homo sapiens
ARDLISVIRGLGGGMDV

SEQ ID NO: 2899 - protein, 19 aa, Homo sapiens
ARGGPLPWSDLDIVGTFDY

SEQ ID NO: 2900 - protein, 18 aa, Homo sapiens
VKDQSSGDRLLYLGYFDL

SEQ ID NO: 2901 - protein, 18 aa, Homo sapiens
VKDQSSGDRLLYLGYFDL

SEQ ID NO: 2902 - protein, 20 aa, Homo sapiens
ATMWGGLCTASNCYGNPMDV

SEQ ID NO: 2903 - protein, 22 aa, Homo sapiens
VRDSDPYTATVTSNHYWYAMDV

SEQ ID NO: 2904 - protein, 22 aa, Homo sapiens
ARGQGGYDLRRVGYGLTSWFDP

SEQ ID NO: 2905 - protein, 20 aa, Homo sapiens
ARVLAGSSHEWQLTHDAFDI

SEQ ID NO: 2906 - protein, 17 aa, Homo sapiens
AKDLITVIRGLGGGMDV

SEQ ID NO: 2907 - protein, 15 aa, Homo sapiens
ARDGPYDSGGYHLNH

SEQ ID NO: 2908 - protein, 13 aa, Homo sapiens
ARMGPYGSGTFDY

SEQ ID NO: 2909 - protein, 17 aa, Homo sapiens
ARDLSTLQPDAIVNFDY

SEQ ID NO: 2910 - protein, 16 aa, Homo sapiens
ARDLYYDNGGYNYLDY

SEQ ID NO: 2911 - protein, 20 aa, Homo sapiens
VRDYCNSVSCYTYYYIGMDV

SEQ ID NO: 2912 - protein, 16 aa, Homo sapiens
ATSASSYSRYYFGLDV

SEQ ID NO: 2913 - protein, 18 aa, Homo sapiens
ARDLAKWSYGYYYSGMDV

SEQ ID NO: 2914 - protein, 17 aa, Homo sapiens
AREEYSGTVHNFFGMDV

SEQ ID NO: 2915 - protein, 18 aa, Homo sapiens
AKDGRYCSGISCRTGMDV

SEQ ID NO: 2916 - protein, 14 aa, Homo sapiens
ARGLLDYLHDAFDI

SEQ ID NO: 2917 - protein, 15 aa, Homo sapiens
ASRHLDLLPIGSFDV

SEQ ID NO: 2918 - protein, 16 aa, Homo sapiens
TRGSGMFYGSSSGMDV

SEQ ID NO: 2919 - protein, 14 aa, Homo sapiens
AIRRDYSDYRDFDY

SEQ ID NO: 2920 - protein, 15 aa, Homo sapiens
ARQSSSWYNPYYFDQ

SEQ ID NO: 2921 - protein, 14 aa, Homo sapiens
ARGLLDYLHDAFDI

SEQ ID NO: 2922 - protein, 19 aa, Homo sapiens
ARDPSILNTGNHHWYDLDL

SEQ ID NO: 2923 - protein, 14 aa, Homo sapiens
ARPRSGSYRQAIDY

SEQ ID NO: 2924 - protein, 16 aa, Homo sapiens
VRQNVAIQYYYYAMDV

SEQ ID NO: 2925 - protein, 14 aa, Homo sapiens
ARAKGGSYSNAFDY

SEQ ID NO: 2926 - protein, 19 aa, Homo sapiens
ARDPSILDTGNHHWYDLDI

SEQ ID NO: 2927 - protein, 17 aa, Homo sapiens
AREEYSGTVHNFFGMDV

SEQ ID NO: 2928 - protein, 15 aa, Homo sapiens
VRDWGSSTHYDVFDL

SEQ ID NO: 2929 - protein, 19 aa, Homo sapiens
ARDPSILNTGNHHWYDLDL

SEQ ID NO: 2930 - protein, 19 aa, Homo sapiens
ARDASIVGTGNHLWYGLDF

SEQ ID NO: 2931 - protein, 16 aa, Homo sapiens
ARDNALQDGRPGYFDS

SEQ ID NO: 2932 - protein, 16 aa, Homo sapiens
ARGHRFLEFPLNYFDP

SEQ ID NO: 2933 - protein, 16 aa, Homo sapiens
ARDNALQDGRPGYFDS

SEQ ID NO: 2934 - protein, 23 aa, Homo sapiens
ALLYGSGSYYNFVFFGWKDGSDA

SEQ ID NO: 2935 - protein, 19 aa, Homo sapiens
ARDPSILNTGNHHWYDLDL

SEQ ID NO: 2936 - protein, 19 aa, Homo sapiens
ARDPSIHYTGNHHWYDLDI

SEQ ID NO: 2937 - protein, 19 aa, Homo sapiens
ARDPSIHYTGNHHWYDLDI

SEQ ID NO: 2938 - protein, 22 aa, Homo sapiens
VRDSEPYTATRSQNHYWYDMDV

SEQ ID NO: 2939 - protein, 19 aa, Homo sapiens
ARDPSIHYTGNHHWYDLDI

SEQ ID NO: 2940 - protein, 19 aa, Homo sapiens
ARDPSIVDSGPHHWYDLDI

SEQ ID NO: 2941 - protein, 9 aa, Homo sapiens
ASGPNYFDY

SEQ ID NO: 2942 - protein, 18 aa, Homo sapiens
ARADRDYDFWSDPPLIDH

SEQ ID NO: 2943 - protein, 14 aa, Homo sapiens
ARGFGNGWSYYFDY

SEQ ID NO: 2944 - protein, 22 aa, Homo sapiens
ARDPGLEYSGNYFSYYYYAMDV

SEQ ID NO: 2945 - protein, 22 aa, Homo sapiens
VRDSDPYTATSRNNHYWYDMDV

SEQ ID NO: 2946 - protein, 19 aa, Homo sapiens
ARDPTFLNSGNHFWYAVDI

SEQ ID NO: 2947 - protein, 22 aa, Homo sapiens
VRDSDPYTATYRNNHYWYAMDV

SEQ ID NO: 2948 - protein, 13 aa, Homo sapiens
ARMGPSGSGSLDY

SEQ ID NO: 2949 - protein, 17 aa, Homo sapiens
AHTSELPPRRPYAAFDF

SEQ ID NO: 2950 - protein, 9 aa, Homo sapiens
ARDLPPLDY

SEQ ID NO: 2951 - protein, 20 aa, Homo sapiens
ARGFTFTYSDFLTGQRTFEY

SEQ ID NO: 2952 - protein, 13 aa, Homo sapiens
ARSYGGSYSTVGY

SEQ ID NO: 2953 - protein, 11 aa, Homo sapiens
SWNDVGWAFTF

SEQ ID NO: 2954 - protein, 17 aa, Homo sapiens
AAEERSGTNHNYYGLDV

SEQ ID NO: 2955 - protein, 18 aa, Homo sapiens
ARDREMAIITERSYGLDV

SEQ ID NO: 2956 - protein, 18 aa, Homo sapiens
AKDRYCSGGSCFYDAFDI

SEQ ID NO: 2957 - protein, 15 aa, Homo sapiens
AREAQSSGRAGCLDA

SEQ ID NO: 2958 - protein, 19 aa, Homo sapiens
ARDPSIHYTGNHHWYDLDI

SEQ ID NO: 2959 - protein, 22 aa, Homo sapiens
VRDSDPYTATVRSNHYWYAMDV

SEQ ID NO: 2960 - protein, 19 aa, Homo sapiens
ARDPTFLNSGNHFWYAVDI

SEQ ID NO: 2961 - protein, 19 aa, Homo sapiens
AAPAPSNHESWSGTDWFDP

SEQ ID NO: 2962 - protein, 16 aa, Homo sapiens
ARTTPRGWEQWPVLEY

SEQ ID NO: 2963 - protein, 17 aa, Homo sapiens
ARELDSETYYNYNSLDV

SEQ ID NO: 2964 - protein, 21 aa, Homo sapiens
ARVVFRHGQYDDSSGRLAFDI

SEQ ID NO: 2965 - protein, 19 aa, Homo sapiens
ARDPSIHYTGNHHWYDLDI

SEQ ID NO: 2966 - protein, 22 aa, Homo sapiens
VRDSDPYTATSRNNHYWYGMDV

SEQ ID NO: 2967 - protein, 15 aa, Homo sapiens
AREPDGIGAAGISGY

SEQ ID NO: 2968 - protein, 16 aa, Homo sapiens
AREMATSFGYYFVLDV

SEQ ID NO: 2969 - protein, 18 aa, Homo sapiens
ARGQESPIVGVTGRWFDP

SEQ ID NO: 2970 - protein, 14 aa, Homo sapiens
VRPYSGSYTNWFDL

SEQ ID NO: 2971 - protein, 19 aa, Homo sapiens
ARDPSILNTGNHHWYDLDI

SEQ ID NO: 2972 - protein, 19 aa, Homo sapiens
ARDPTFLNTGNHFWYAVDI

SEQ ID NO: 2973 - protein, 22 aa, Homo sapiens
VRDSDPYTATSRNNHYWYAMDV

SEQ ID NO: 2974 - protein, 19 aa, Homo sapiens
ARDPSFLNTGNHFWYDFDL

SEQ ID NO: 2975 - protein, 20 aa, Homo sapiens
ARGMISPRIPRTTRQRWFDT

SEQ ID NO: 2976 - protein, 21 aa, Homo sapiens
ARGKAHRNDFWSGYYPHWFDP

SEQ ID NO: 2977 - protein, 22 aa, Homo sapiens
ARDSDPYTATRRHNHYWYAMDV

SEQ ID NO: 2978 - protein, 23 aa, Homo sapiens
ARGLVVRYFDGFPSGPIIGAFDI

SEQ ID NO: 2979 - protein, 22 aa, Homo sapiens
VRDPDPYTATVRHNHYWHGMDV

SEQ ID NO: 2980 - protein, 23 aa, Homo sapiens
ARGSLSREYDFLTAPQNGPWFDS

SEQ ID NO: 2981 - protein, 21 aa, Homo sapiens
ARHSQKDIVLIPAAQSPIFDY

SEQ ID NO: 2982 - protein, 14 aa, Homo sapiens
VKDGGYYDSSGPGH

SEQ ID NO: 2983 - protein, 15 aa, Homo sapiens
ARESRSSGRAGCFDS

SEQ ID NO: 2984 - protein, 14 aa, Homo sapiens
ARAYGGNYQNHFDH

SEQ ID NO: 2985 - protein, 26 aa, Homo sapiens
ARGTISPIVGVPTPVVPRRGRSWFDP

SEQ ID NO: 2986 - protein, 22 aa, Homo sapiens
VRDSDPYTATSRNNHYWYAMDV

SEQ ID NO: 2987 - protein, 22 aa, Homo sapiens
VRDSDPYTATSSHNHYWYAMDV

SEQ ID NO: 2988 - protein, 11 aa, Homo sapiens
ARDRGSGVIDP

SEQ ID NO: 2989 - protein, 14 aa, Homo sapiens
VKDGGYYDSSGPGH

SEQ ID NO: 2990 - protein, 20 aa, Homo sapiens
ARVGWVRYFDWSKPYYYFDL

SEQ ID NO: 2991 - protein, 21 aa, Homo sapiens
AKCDLVRYFDWLGEENNWFDP

SEQ ID NO: 2992 - protein, 22 aa, Homo sapiens
VRDSDPYTATVRNNHYWYALDV

SEQ ID NO: 2993 - protein, 17 aa, Homo sapiens
ARATPPGGGTGWPYFDF

SEQ ID NO: 2994 - protein, 17 aa, Homo sapiens
AREEPSGTYHNYYGLDV

SEQ ID NO: 2995 - protein, 23 aa, Homo sapiens
AARIRGATHYDFWSGFWAGPFDI

SEQ ID NO: 2996 - protein, 19 aa, Homo sapiens
ARTQSNDFWSGYYTAAFDL

SEQ ID NO: 2997 - protein, 23 aa, Homo sapiens
ARGSLSREYDFLTAPQNGPWFDS

SEQ ID NO: 2998 - protein, 17 aa, Homo sapiens
VLDTTSANPHNWYGMDV

SEQ ID NO: 2999 - protein, 13 aa, Homo sapiens
ARMGPYGSGSFDY

SEQ ID NO: 3000 - protein, 15 aa, Homo sapiens
AGRHQELLPMGSFDM

SEQ ID NO: 3001 - protein, 19 aa, Homo sapiens
ARDPSILNTGNHHWYDLDI

SEQ ID NO: 3002 - protein, 15 aa, Homo sapiens
VRDGAYDSSGYYSTQ

SEQ ID NO: 3003 - protein, 19 aa, Homo sapiens
ARDPTFLNSGNHFWYAVDI

SEQ ID NO: 3004 - protein, 19 aa, Homo sapiens
ARDPTFLNTGNHFWYAVDI

SEQ ID NO: 3005 - protein, 20 aa, Homo sapiens
ARDFGVRYDDSRQLMKYCDS

SEQ ID NO: 3006 - protein, 19 aa, Homo sapiens
ARDPSILNTGNHHWYDLDL

SEQ ID NO: 3007 - protein, 17 aa, Homo sapiens
VVDTTMADPHNWYGLDV

SEQ ID NO: 3008 - protein, 23 aa, Homo sapiens
ARVRVGASHHNFWSGYYTDAFDI

SEQ ID NO: 3009 - protein, 19 aa, Homo sapiens
ARDPSFLNTGNHFWYDFDM

SEQ ID NO: 3010 - protein, 15 aa, Homo sapiens
VRDGAYDSSGYYSTQ

SEQ ID NO: 3011 - protein, 17 aa, Homo sapiens
ARDFPGDTAVAGTGFNY

SEQ ID NO: 3012 - protein, 19 aa, Homo sapiens
SRDLRRGYYDSNGHQQFDL

SEQ ID NO: 3013 - protein, 29 aa, Homo sapiens
ARDPGPITFFDWSPDKSRKSYYDYNGMDV

SEQ ID NO: 3014 - protein, 9 aa, Homo sapiens
ARDLPPLDY

SEQ ID NO: 3015 - protein, 22 aa, Homo sapiens
VRDSDPYTTTFSHNHYWYAMDV

SEQ ID NO: 3016 - protein, 18 aa, Homo sapiens
VKDNVILPGAIVRPQFDY

SEQ ID NO: 3017 - protein, 19 aa, Homo sapiens
ARDPSILNTGNHHWYDLDM

SEQ ID NO: 3018 - protein, 18 aa, Homo sapiens
ARDNVVQQNADNVGYFDF

SEQ ID NO: 3019 - protein, 19 aa, Homo sapiens
ARDPSILNTGNHHWYDLDL

SEQ ID NO: 3020 - protein, 22 aa, Homo sapiens
VRDSDPYTATSRNNHYWYGMDV

SEQ ID NO: 3021 - protein, 19 aa, Homo sapiens
ARDPSILNTGNHHWYDLDM

SEQ ID NO: 3022 - protein, 17 aa, Homo sapiens
AREGTSLGYYYYYAMDV

SEQ ID NO: 3023 - protein, 19 aa, Homo sapiens
ARDPSILNTGNHHWYDLDM

SEQ ID NO: 3024 - protein, 15 aa, Homo sapiens
ARGPIRHFGLDAFDI

SEQ ID NO: 3025 - protein, 22 aa, Homo sapiens
VRDSDPYTATSRNNHYWYGMDV

SEQ ID NO: 3026 - protein, 19 aa, Homo sapiens
ARDPSILNTGNHHWYDLDM

SEQ ID NO: 3027 - protein, 15 aa, Homo sapiens
VKDLGATVTYDVFDV

SEQ ID NO: 3028 - protein, 15 aa, Homo sapiens
AKERDLPGRGGYFDH

SEQ ID NO: 3029 - protein, 23 aa, Homo sapiens
ARGYTAPIIREVPITFRPRWFDP

SEQ ID NO: 3030 - protein, 13 aa, Homo sapiens
ARMGPYGSGTFDY

SEQ ID NO: 3031 - protein, 16 aa, Homo sapiens
ARDHALQNGRPGYFDS

SEQ ID NO: 3032 - protein, 14 aa, Homo sapiens
VREGQQWLGLYFDH

SEQ ID NO: 3033 - protein, 18 aa, Homo sapiens
AREKKSFGPQYYYGSGED

SEQ ID NO: 3034 - protein, 20 aa, Homo sapiens
VRQRYCSGGSCFLFEDAFEI

SEQ ID NO: 3035 - protein, 10 aa, Homo sapiens
VRDTDWAFDS

SEQ ID NO: 3036 - protein, 17 aa, Homo sapiens
AHTSELPPRRPYAAFDF

SEQ ID NO: 3037 - protein, 8 aa, Homo sapiens
ANTNFLDY

SEQ ID NO: 3038 - protein, 21 aa, Homo sapiens
TRSFISFDSSGHPYYYYAMDV

SEQ ID NO: 3039 - protein, 11 aa, Homo sapiens
TRETGTDEFDF

SEQ ID NO: 3040 - protein, 20 aa, Homo sapiens
ATMWGGLCTASNCYGNPMDV

SEQ ID NO: 3041 - protein, 20 aa, Homo sapiens
ATMWGGLCTASNCYGNPMDV

SEQ ID NO: 3042 - protein, 20 aa, Homo sapiens
ATMWGGLCTASNCYGNPMDV

SEQ ID NO: 3043 - protein, 11 aa, Homo sapiens
ARDLAWTFFDY

SEQ ID NO: 3044 - protein, 17 aa, Homo sapiens
ARATPPGGTTGWPYIDL

SEQ ID NO: 3045 - protein, 8 aa, Homo sapiens
ANTNFLDY

SEQ ID NO: 3046 - protein, 13 aa, Homo sapiens
AKLGTDHPIGVDV

SEQ ID NO: 3047 - protein, 14 aa, Homo sapiens
VKALYSSSWCPFDY

SEQ ID NO: 3048 - protein, 17 aa, Homo sapiens
ARELDSETYYNYNSLDV

SEQ ID NO: 3049 - protein, 17 aa, Homo sapiens
AKAQGIYYRGWSYWFDP

SEQ ID NO: 3050 - protein, 24 aa, Homo sapiens
AREARRQVTQWFGEFWGPYNWFDP

SEQ ID NO: 3051 - protein, 18 aa, Homo sapiens
ARGLISYTLWLRESYFDY

SEQ ID NO: 3052 - protein, 19 aa, Homo sapiens
ARDPSILNTGNHHWYDLDI

SEQ ID NO: 3053 - protein, 11 aa, Homo sapiens
ARDYGDGPPDH

SEQ ID NO: 3054 - protein, 17 aa, Homo sapiens
VLDTTMSHPHNWYGMDV

SEQ ID NO: 3055 - protein, 18 aa, Homo sapiens
ASEYFDGRSYHSFCGLDV

SEQ ID NO: 3056 - protein, 19 aa, Homo sapiens
ARDPSILNTGPHHWYDLDI

SEQ ID NO: 3057 - protein, 22 aa, Homo sapiens
VRDSEPYTATRSQNHYWYDMDV

SEQ ID NO: 3058 - protein, 19 aa, Homo sapiens
AREFGVRFLDRSLFGAMDV

SEQ ID NO: 3059 - protein, 12 aa, Homo sapiens
ARAGGYLSAFDI

SEQ ID NO: 3060 - protein, 19 aa, Homo sapiens
ARDPSFLNAGNHFYYDFDV

SEQ ID NO: 3061 - protein, 18 aa, Homo sapiens
ARAGNIVVMPAAQYYFDY

SEQ ID NO: 3062 - protein, 19 aa, Homo sapiens
VRDDVLQHSRPSGPGYFVS

SEQ ID NO: 3063 - protein, 19 aa, Homo sapiens
ARGSQIDLRGGLGATFFDY

SEQ ID NO: 3064 - protein, 22 aa, Homo sapiens
ARDSDPYTATRRHNHYWYAMDV

SEQ ID NO: 3065 - protein, 10 aa, Homo sapiens
VRDTDWAFDS

SEQ ID NO: 3066 - protein, 17 aa, Homo sapiens
ARRGNNFGYYYYYTVDV

SEQ ID NO: 3067 - protein, 20 aa, Homo sapiens
ARVLAGSSHEWQLTHDAFDI

SEQ ID NO: 3068 - protein, 20 aa, Homo sapiens
AKGDWIRYFDWSLPISFFDY

SEQ ID NO: 3069 - protein, 18 aa, Homo sapiens
ARTTSPLTYSGHWPLFDY

SEQ ID NO: 3070 - protein, 22 aa, Homo sapiens
VRDSDPYTATSRNNHYWYGMDV

SEQ ID NO: 3071 - protein, 19 aa, Homo sapiens
ARDPSILNTGNHHWYDLDI

SEQ ID NO: 3072 - protein, 19 aa, Homo sapiens
ARDPSILNTGNHHWYDLDI

SEQ ID NO: 3073 - protein, 15 aa, Homo sapiens
VRMDWMEWMKYYFDS

SEQ ID NO: 3074 - protein, 19 aa, Homo sapiens
ARDPSILNTGNHHWYDLDM

SEQ ID NO: 3075 - protein, 19 aa, Homo sapiens
VRDDVLQHSRPSGPGYFVS

SEQ ID NO: 3076 - protein, 20 aa, Homo sapiens
ATMWGGLCTASNCYGNPMDV

SEQ ID NO: 3077 - protein, 7 aa, Mus musculus
TRSAMDY

SEQ ID NO: 3078 - protein, 4 aa, Mus musculus
ALRR

SEQ ID NO: 3079 - protein, 4 aa, Mus musculus
ALRR

SEQ ID NO: 3080 - protein, 4 aa, Mus musculus
ALRR

SEQ ID NO: 3081 - protein, 13 aa, Mus musculus
ARIYDFDEDYFDV

SEQ ID NO: 3082 - protein, 15 aa, Homo sapiens
VKDQDSSSWYDAFDI

SEQ ID NO: 3083 - protein, 15 aa, Homo sapiens
VKDQDSSSWYDAFDI

SEQ ID NO: 3084 - protein, 12 aa, Homo sapiens
ARDLSVRGGMDV

SEQ ID NO: 3085 - protein, 15 aa, Homo sapiens
AKDLVTAPSYEAFDI

SEQ ID NO: 3086 - protein, 11 aa, Homo sapiens
ARDLQYYGMDV

SEQ ID NO: 3087 - protein, 15 aa, Homo sapiens
VKDQDSNSWYDAFDI

SEQ ID NO: 3088 - protein, 12 aa, Homo sapiens
ARDLAVAGAFDI

SEQ ID NO: 3089 - protein, 12 aa, Homo sapiens
ARDLSVRGGMDV

SEQ ID NO: 3090 - protein, 13 aa, Homo sapiens
ALASGSYFGGANY

SEQ ID NO: 3091 - protein, 13 aa, Homo sapiens
ATGARFGESPFDY

SEQ ID NO: 3092 - protein, 13 aa, Homo sapiens
ATGARFGESPFDY

SEQ ID NO: 3093 - protein, 23 aa, Homo sapiens
AREGGLDYFGSRNSGWTYTWFDP

SEQ ID NO: 3094 - protein, 20 aa, Homo sapiens
ARGVNYYDRNGYYRNDGFDI

SEQ ID NO: 3095 - protein, 15 aa, Homo sapiens
ASSKGFCSGGSCSDY

SEQ ID NO: 3096 - protein, 17 aa, Homo sapiens
AKDLRRQDYYADWYFDL

SEQ ID NO: 3097 - protein, 20 aa, Homo sapiens
ARGVNYYDRNGYYRNDGFDI

SEQ ID NO: 3098 - protein, 17 aa, Homo sapiens
AKDLRRQDYYADWYFDL

SEQ ID NO: 3099 - protein, 20 aa, Homo sapiens
ARGVNYYDRNGYYRNDGFDI

SEQ ID NO: 3100 - protein, 11 aa, Homo sapiens
AKIGSRNSLGV

SEQ ID NO: 3101 - protein, 16 aa, Homo sapiens
AAPRCSGGSCYDGFDI

SEQ ID NO: 3102 - protein, 14 aa, Lama pocos
NVKDEGATTKVYDY

SEQ ID NO: 3103 - protein, 14 aa, Lama pocos
NVKDWGAANKYYDY

SEQ ID NO: 3104 - protein, 14 aa, Lama pocos
NVKDDGQLAYHYDY

SEQ ID NO: 3105 - protein, 14 aa, Lama pocos
NVKDDGQLAYHYDY

SEQ ID NO: 3106 - protein, 14 aa, Lama pocos
NVWDDGQLAYHYDY

SEQ ID NO: 3107 - protein, 14 aa, Lama pocos
NVYDDGQLAYHYDY

SEQ ID NO: 3108 - protein, 14 aa, Lama pocos
NVKDYGWYNSQYDY

SEQ ID NO: 3109 - protein, 14 aa, Lama pocos
NVKDYGAASWEYDY

SEQ ID NO: 3110 - protein, 14 aa, Lama pocos
NVKDFGGHQAYYDY

SEQ ID NO: 3111 - protein, 14 aa, Lama pocos
NVKDEGDTSASYDY

SEQ ID NO: 3112 - protein, 14 aa, Lama pocos
NVKDEGYFSDEYDY

SEQ ID NO: 3113 - protein, 14 aa, Lama pocos
NVKDWGSSNQYYDY

SEQ ID NO: 3114 - protein, 23 aa, Lama pocos
AAVPSTYYNGSYYYTCHPGGMDY

SEQ ID NO: 3115 - protein, 23 aa, Lama pocos
AAVPSTYYSGTYYYNCHPGGMDY

SEQ ID NO: 3116 - protein, 23 aa, Lama pocos
ATAPGTYYKGSYYPMCHYYGMDY

SEQ ID NO: 3117 - protein, 23 aa, Lama pocos
ATRPLTYYSGSYYTTCSDYGMDY

SEQ ID NO: 3118 - protein, 23 aa, Lama pocos
AAVPSTYYSGSYYYTCHPGGMDY

SEQ ID NO: 3119 - protein, 23 aa, Lama pocos
AAVPSTYYSGSYYYTCHPGGMDY

SEQ ID NO: 3120 - protein, 23 aa, Lama pocos
AAVPSTYYSGSYYYTCHPGGMDY

SEQ ID NO: 3121 - protein, 23 aa, Lama pocos
AAVPSTYYSGSYYYTCHPGGMDY

SEQ ID NO: 3122 - protein, 23 aa, Lama pocos
ASFPSTYYSGSYYYTCHPGGMDY

SEQ ID NO: 3123 - protein, 23 aa, Lama pocos
AAVPSTYYSGTYYYNCHPGAMHY

SEQ ID NO: 3124 - protein, 23 aa, Lama pocos
AAVPSTYYSGTYYYNCHPGAMHY

SEQ ID NO: 3125 - protein, 23 aa, Lama pocos
AAVPSTYYSGTYYYTCHPGGMDY

SEQ ID NO: 3126 - protein, 23 aa, Lama pocos
AAVPSTYYSGTYYYTCHPGGMDY

SEQ ID NO: 3127 - protein, 20 aa, Homo sapiens
ARAVVGIVVVPAAGRRAFDI

SEQ ID NO: 3128 - protein, 18 aa, Homo sapiens
AKDRFQFARSWYGDYFDY

SEQ ID NO: 3129 - protein, 17 aa, Homo sapiens
ARINTAAYDYDSTTFDI

SEQ ID NO: 3130 - protein, 17 aa, Homo sapiens
ARERDDIFPMGLNAFDI

SEQ ID NO: 3131 - protein, 14 aa, Homo sapiens
ARGDSSGYYYYFDY

SEQ ID NO: 3132 - protein, 16 aa, Homo sapiens
ASDYFDSSGYYHSFDY

SEQ ID NO: 3133 - protein, 20 aa, Homo sapiens
ARDYTRGAWFGESLIGGFDN

SEQ ID NO: 3134 - protein, 19 aa, Homo sapiens
ATRTYDSSGYRPYYYGLDV

SEQ ID NO: 3135 - protein, 17 aa, Homo sapiens
ARDLWWNDQAHYYGMDV

SEQ ID NO: 3136 - protein, 8 aa, Lama pocos
RVFVGWHY

SEQ ID NO: 3137 - protein, 8 aa, Lama pocos
TVYVGYEY

SEQ ID NO: 3138 - protein, 8 aa, Lama pocos
EVEVGKWY

SEQ ID NO: 3139 - protein, 8 aa, Lama pocos
YVWVGQEY

SEQ ID NO: 3140 - protein, 8 aa, Lama pocos
WVIVGEYY

SEQ ID NO: 3141 - protein, 8 aa, Lama pocos
YVYVGSSY

SEQ ID NO: 3142 - protein, 8 aa, Lama pocos
FVYVGRSY

SEQ ID NO: 3143 - protein, 8 aa, Lama pocos
IVWVGAQY

SEQ ID NO: 3144 - protein, 8 aa, Lama pocos
HVWVGSLY

SEQ ID NO: 3145 - protein, 8 aa, Lama pocos
YVYVGASY

SEQ ID NO: 3146 - protein, 8 aa, Lama pocos
YVYVGSSY

SEQ ID NO: 3147 - protein, 9 aa, Lama pocos
RAVYVGMHY

SEQ ID NO: 3148 - protein, 8 aa, Lama pocos
YVYVGKSY

SEQ ID NO: 3149 - protein, 8 aa, Lama pocos
FVGVGTHY

SEQ ID NO: 3150 - protein, 8 aa, Lama pocos
FVYVGKSY

SEQ ID NO: 3151 - protein, 8 aa, Lama pocos
FVYVGKSY

SEQ ID NO: 3152 - protein, 14 aa, Lama pocos
NVKDFGTHHYAYDY

SEQ ID NO: 3153 - protein, 14 aa, Lama pocos
NVKDKGMAVQWYDY

SEQ ID NO: 3154 - protein, 14 aa, Lama pocos
NVKDEGDMFTAYDY

SEQ ID NO: 3155 - protein, 14 aa, Lama pocos
NVKDSGQWRQEYDY

SEQ ID NO: 3156 - protein, 14 aa, Lama pocos
NVKDFGYTWHEYDY

SEQ ID NO: 3157 - protein, 8 aa, Lama pocos
VVWVGHNY

SEQ ID NO: 3158 - protein, 14 aa, Lama pocos
NVKDYGQAHAYYDY

SEQ ID NO: 3159 - protein, 13 aa, Lama pocos
NVKDTGTTEDYDY

SEQ ID NO: 3160 - protein, 14 aa, Lama pocos
NVKDAGRVYNSYDY

SEQ ID NO: 3161 - protein, 14 aa, Lama pocos
NVKDTGTYRFYYDY

SEQ ID NO: 3162 - protein, 14 aa, Lama pocos
NVKDAGVYNRYYDY

SEQ ID NO: 3163 - protein, 14 aa, Lama pocos
NVKDWGFASHAYDY

SEQ ID NO: 3164 - protein, 14 aa, Lama pocos
NVKDFGWQHQEYDY

SEQ ID NO: 3165 - protein, 14 aa, Lama pocos
NVKDSGSFNQAYDY

SEQ ID NO: 3166 - protein, 14 aa, Lama pocos
NVKDYGVHFKRYDY

SEQ ID NO: 3167 - protein, 14 aa, Lama pocos
NVKDAGNTTSAYDY

SEQ ID NO: 3168 - protein, 8 aa, Lama pocos
EVQVGAWY

SEQ ID NO: 3169 - protein, 14 aa, Lama pocos
NVKDIDAEAYAYDY

SEQ ID NO: 3170 - protein, 14 aa, Lama pocos
NVKDSGQWRVQYDY

SEQ ID NO: 3171 - protein, 14 aa, Lama pocos
NVKDHGAQNQMYDY

SEQ ID NO: 3172 - protein, 14 aa, Lama pocos
NVKDVGHHYEYYDY

SEQ ID NO: 3173 - protein, 14 aa, Lama pocos
NVKDKGQMRAAYDY

SEQ ID NO: 3174 - protein, 14 aa, Lama pocos
NVKDYGSSYYKYDY

SEQ ID NO: 3175 - protein, 13 aa, Lama pocos
NVKDAGSSYWDYD

SEQ ID NO: 3176 - protein, 18 aa, Lama pocos
AAARWGRTKPLNTYYYSY

SEQ ID NO: 3177 - protein, 8 aa, Lama pocos
RVHVGAHY

SEQ ID NO: 3178 - protein, 17 aa, Lama pocos
AAATEGHAHALYRLHYY

SEQ ID NO: 3179 - protein, 8 aa, Lama pocos
RVWVGTHY

SEQ ID NO: 3180 - protein, 18 aa, Lama pocos
AAAYVGAENPLPYSMYGY

SEQ ID NO: 3181 - protein, 18 aa, Lama pocos
AAADYGASDPLWFIHYLY

SEQ ID NO: 3182 - protein, 18 aa, Lama pocos
AAANYGSNFPLAEEDYWY

SEQ ID NO: 3183 - protein, 19 aa, Lama pocos
AAAYYFGDDIPLWWEAYSY

SEQ ID NO: 3184 - protein, 18 aa, Lama pocos
AAARWGRHMPLSATEYSY

SEQ ID NO: 3185 - protein, 18 aa, Lama pocos
AAAAWGNSAPLTTYRYYY

SEQ ID NO: 3186 - protein, 8 aa, Lama pocos
YVYVGAQY

SEQ ID NO: 3187 - protein, 18 aa, Lama pocos
AAADWGYDWPLWDEWYWY

SEQ ID NO: 3188 - protein, 18 aa, Lama pocos
AAANYGANYPLYSQQYSY

SEQ ID NO: 3189 - protein, 18 aa, Lama pocos
AAANYGANEPLQYTHYNY

SEQ ID NO: 3190 - protein, 18 aa, Lama pocos
AAASYGAAHPLSIMRYYY

SEQ ID NO: 3191 - protein, 18 aa, Lama pocos
AAASYGANFPLKASDYSY

SEQ ID NO: 3192 - protein, 18 aa, Lama pocos
AAADWGYDWPLWDEWYWY

SEQ ID NO: 3193 - protein, 18 aa, Lama pocos
AAATWGHSWPLYNDEYWY

SEQ ID NO: 3194 - protein, 18 aa, Lama pocos
AAAAWGYAWPLHQDDYWY

SEQ ID NO: 3195 - protein, 18 aa, Lama pocos
AAATWGYSWPLIAEYNWY

SEQ ID NO: 3196 - protein, 8 aa, Lama pocos
FVKVGNWY

SEQ ID NO: 3197 - protein, 18 aa, Lama pocos
AAANWGYSWPLYEADDWY

SEQ ID NO: 3198 - protein, 8 aa, Lama pocos
YVYVGGSY

SEQ ID NO: 3199 - protein, 8 aa, Lama pocos
RVFVGMHY

SEQ ID NO: 3200 - protein, 18 aa, Lama pocos
AAANWGYSWPLYQTEYWY

SEQ ID NO: 3201 - protein, 8 aa, Lama pocos
YVKVGEWY

SEQ ID NO: 3202 - protein, 8 aa, Lama pocos
YVVVGWGY

SEQ ID NO: 3203 - protein, 8 aa, Lama pocos
FVVVGNGY

SEQ ID NO: 3204 - protein, 8 aa, Lama pocos
YVYVGGSY

SEQ ID NO: 3205 - protein, 8 aa, Lama pocos
LVYVGATY

SEQ ID NO: 3206 - protein, 8 aa, Lama pocos
YVYVGASY

SEQ ID NO: 3207 - protein, 8 aa, Lama pocos
YVYVGGSY

SEQ ID NO: 3208 - protein, 8 aa, Lama pocos
YVYVGASY

SEQ ID NO: 3209 - protein, 8 aa, Lama pocos
AVQVGYWY

SEQ ID NO: 3210 - protein, 8 aa, Lama pocos
YVYVGAGY

SEQ ID NO: 3211 - protein, 8 aa, Lama pocos
YVWVGRSY

SEQ ID NO: 3212 - protein, 8 aa, Lama pocos
YVYVGSSY

SEQ ID NO: 3213 - protein, 8 aa, Lama pocos
YVYVGESY

SEQ ID NO: 3214 - protein, 8 aa, Lama pocos
VVWVGEVY

SEQ ID NO: 3215 - protein, 14 aa, Lama pocos
NVKDEGNTTAYYDY

SEQ ID NO: 3216 - protein, 14 aa, Lama pocos
NVKDFGTQEHYYDY

SEQ ID NO: 3217 - protein, 14 aa, Lama pocos
NVKDFGGYRYYYDY

SEQ ID NO: 3218 - protein, 14 aa, Lama pocos
NVKDEGAIAKNYDY

SEQ ID NO: 3219 - protein, 14 aa, Lama pocos
NVKDEGYTGYYYDY

SEQ ID NO: 3220 - protein, 14 aa, Lama pocos
NVKDWGSQDRYYDY

SEQ ID NO: 3221 - protein, 14 aa, Lama pocos
NVKDEGKSSQVYDY

SEQ ID NO: 3222 - protein, 14 aa, Lama pocos
NVKDVGNDQKSYDY

SEQ ID NO: 3223 - protein, 14 aa, Lama pocos
NVKDWGTYSTYYDY

SEQ ID NO: 3224 - protein, 8 aa, Lama pocos
YVYVGASY

SEQ ID NO: 3225 - protein, 14 aa, Lama pocos
NVKDWGWLAQYYDY

SEQ ID NO: 3226 - protein, 14 aa, Lama pocos
NVKDEGMWQHYYDY

SEQ ID NO: 3227 - protein, 14 aa, Lama pocos
NVKDEGNSQSHYDY

SEQ ID NO: 3228 - protein, 14 aa, Lama pocos
NVKDAGNSKALYDY

SEQ ID NO: 3229 - protein, 14 aa, Lama pocos
NVKDWGRAGARYDY

SEQ ID NO: 3230 - protein, 14 aa, Lama pocos
NVKDMDRWRTTYDY

SEQ ID NO: 3231 - protein, 8 aa, Lama pocos
YVWVGNQY

SEQ ID NO: 3232 - protein, 14 aa, Lama pocos
NVKDWGYEYEGYDY

SEQ ID NO: 3233 - protein, 14 aa, Lama pocos
NVKDTGTYQAWYDY

SEQ ID NO: 3234 - protein, 14 aa, Lama pocos
NVKDWGGYQWYYDY

SEQ ID NO: 3235 - protein, 14 aa, Lama pocos
NVKDYGAQAHYYDY

SEQ ID NO: 3236 - protein, 14 aa, Lama pocos
NVKDWGTYNSYYDY

SEQ ID NO: 3237 - protein, 8 aa, Lama pocos
LVYVGSTY

SEQ ID NO: 3238 - protein, 18 aa, Lama pocos
AAAHYGDNFPLAYQAYLY

SEQ ID NO: 3239 - protein, 18 aa, Lama pocos
AAARWGRDEPLYHYYYSY

SEQ ID NO: 3240 - protein, 14 aa, Lama pocos
NVKDIGAQEVHYDY

SEQ ID NO: 3241 - protein, 18 aa, Lama pocos
AAANYGNNWPLTGVNYWY

SEQ ID NO: 3242 - protein, 8 aa, Lama pocos
YVWVGDSY

SEQ ID NO: 3243 - protein, 18 aa, Lama pocos
AAAKYGQNFPLSYHAYRY

SEQ ID NO: 3244 - protein, 18 aa, Lama pocos
AAARYGRSDPLHYHEYSY

SEQ ID NO: 3245 - protein, 18 aa, Lama pocos
AAASWGYTWPLYTYDYWY

SEQ ID NO: 3246 - protein, 14 aa, Lama pocos
NVKDSGQYRENYDY

SEQ ID NO: 3247 - protein, 8 aa, Lama pocos
WVYVGDYY

SEQ ID NO: 3248 - protein, 18 aa, Lama pocos
AAARWGRQYPLTFVYYSY

SEQ ID NO: 3249 - protein, 18 aa, Lama pocos
AAARWGRTYPLSYMAYTY

SEQ ID NO: 3250 - protein, 18 aa, Lama pocos
AAARWGRYEPLHYAYYSY

SEQ ID NO: 3251 - protein, 18 aa, Lama pocos
AAASYGANWPLVSAAYTY

SEQ ID NO: 3252 - protein, 19 aa, Lama pocos
AAARYGHAQAPLHYFWYGY

SEQ ID NO: 3253 - protein, 8 aa, Lama pocos
YVYVGFSY

SEQ ID NO: 3254 - protein, 8 aa, Lama pocos
YVYVGSSY

SEQ ID NO: 3255 - protein, 8 aa, Lama pocos
YVYVGASY

SEQ ID NO: 3256 - protein, 8 aa, Lama pocos
AVMVGFWY

SEQ ID NO: 3257 - protein, 8 aa, Lama pocos
YVYVGSSY

SEQ ID NO: 3258 - protein, 8 aa, Lama pocos
AVHVGQTY

SEQ ID NO: 3259 - protein, 8 aa, Lama pocos
YVWVGHTY

SEQ ID NO: 3260 - protein, 8 aa, Lama pocos
YVYVGTSY

SEQ ID NO: 3261 - protein, 8 aa, Lama pocos
YVYVGYSY

SEQ ID NO: 3262 - protein, 11 aa, Lama pocos
AIGLNLSSSSV

SEQ ID NO: 3263 - protein, 18 aa, Lama pocos
AAAGLGTVVSEWDYDYDY

SEQ ID NO: 3264 - protein, 13 aa, Lama pocos
HALIKNELGFLDY

SEQ ID NO: 3265 - protein, 13 aa, Lama pocos
HALIKNELGFLDY

SEQ ID NO: 3266 - protein, 9 aa, Homo sapiens
MQALQTPQT

SEQ ID NO: 3267 - protein, 10 aa, Homo sapiens
QQYNKWPPWT

SEQ ID NO: 3268 - protein, 9 aa, Homo sapiens
QQYYSSPYA

SEQ ID NO: 3269 - protein, 9 aa, Homo sapiens
HQYYNTPRT

SEQ ID NO: 3270 - protein, 9 aa, Homo sapiens
RQRSNWPPT

SEQ ID NO: 3271 - protein, 9 aa, Homo sapiens
QQSYSTPPT

SEQ ID NO: 3272 - protein, 9 aa, Homo sapiens
QQTYRPPWT

SEQ ID NO: 3273 - protein, 9 aa, Homo sapiens
MQTLQTPYT

SEQ ID NO: 3274 - protein, 9 aa, Homo sapiens
QQYDNLPLT

SEQ ID NO: 3275 - protein, 9 aa, Homo sapiens
MQATQFPYT

SEQ ID NO: 3276 - protein, 9 aa, Homo sapiens
QQYYSTYGS

SEQ ID NO: 3277 - protein, 11 aa, Homo sapiens
GTWDSSLSVVV

SEQ ID NO: 3278 - protein, 11 aa, Homo sapiens
AAWDDSLNGVV

SEQ ID NO: 3279 - protein, 9 aa, Homo sapiens
LQHNNYPLT

SEQ ID NO: 3280 - protein, 9 aa, Mus musculus
ALWYSNHWV

SEQ ID NO: 3281 - protein, 9 aa, Mus musculus
QQGNTLPYT

SEQ ID NO: 3282 - protein, 8 aa, Mus musculus
LQYDEFRT

SEQ ID NO: 3283 - protein, 9 aa, Mus musculus
ALWYSNQFI

SEQ ID NO: 3284 - protein, 9 aa, Mus musculus
ALWYSNHWV

SEQ ID NO: 3285 - protein, 9 aa, Mus musculus
QQNNEDPLT

SEQ ID NO: 3286 - protein, 9 aa, Mus musculus
FQGSHVPPT

SEQ ID NO: 3287 - protein, 9 aa, Mus musculus
QQNNEDPLT

SEQ ID NO: 3288 - protein, 8 aa, Mus musculus
LQYDEFRT

SEQ ID NO: 3289 - protein, 9 aa, Mus musculus
ALWYSNQFI

SEQ ID NO: 3290 - protein, 9 aa, Mus musculus
QQNNEDPLT

SEQ ID NO: 3291 - protein, 9 aa, Mus musculus
QQSRKVPWT

SEQ ID NO: 3292 - protein, 9 aa, Mus musculus
QQWSSNPPT

SEQ ID NO: 3293 - protein, 9 aa, Mus musculus
QQSRKVPWT

SEQ ID NO: 3294 - protein, 9 aa, Mus musculus
ALWYSNHWV

SEQ ID NO: 3295 - protein, 11 aa, Mus musculus
AAWDDSLIYVL

SEQ ID NO: 3296 - protein, 9 aa, Mus musculus
ALWYNNHWV

SEQ ID NO: 3297 - protein, 9 aa, Mus musculus
QQWSSYPLT

SEQ ID NO: 3298 - protein, 9 aa, Mus musculus
FQGSHVPYT

SEQ ID NO: 3299 - protein, 9 aa, Mus musculus
QQSRKVPWT

SEQ ID NO: 3300 - protein, 9 aa, Mus musculus
QQWSSYPLT

SEQ ID NO: 3301 - protein, 9 aa, Mus musculus
QQSRKVPWT

SEQ ID NO: 3302 - protein, 9 aa, Mus musculus
QQSKEVPWT

SEQ ID NO: 3303 - protein, 9 aa, Mus musculus
QQSNEDPYT

SEQ ID NO: 3304 - protein, 9 aa, Mus musculus
QQNNEDPLT

SEQ ID NO: 3305 - protein, 9 aa, Mus musculus
QQSSSWPLT

SEQ ID NO: 3306 - protein, 9 aa, Mus musculus
QQSSSWPLT

SEQ ID NO: 3307 - protein, 10 aa, Homo sapiens
QSYDSSNHWV

SEQ ID NO: 3308 - protein, 9 aa, Homo sapiens
QQSYSTPRT

SEQ ID NO: 3309 - protein, 9 aa, Homo sapiens
QQYYSTPFT

SEQ ID NO: 3310 - protein, 10 aa, Homo sapiens
QQYGSSRSWT

SEQ ID NO: 3311 - protein, 11 aa, Homo sapiens
QQSYSTFTLYT

SEQ ID NO: 3312 - protein, 9 aa, Homo sapiens
QQSHSFPFT

SEQ ID NO: 3313 - protein, 8 aa, Homo sapiens
QQLNSYVT

SEQ ID NO: 3314 - protein, 11 aa, Homo sapiens
AARDDSLSGWV

SEQ ID NO: 3315 - protein, 8 aa, Homo sapiens
QQRTNWPL

SEQ ID NO: 3316 - protein, 8 aa, Homo sapiens
QQNYSTWT

SEQ ID NO: 3317 - protein, 10 aa, Homo sapiens
CSYAVSSTWV

SEQ ID NO: 3318 - protein, 11 aa, Homo sapiens
QQRSNWPPAFT

SEQ ID NO: 3319 - protein, 11 aa, Homo sapiens
QQRSNWPPKIT

SEQ ID NO: 3320 - protein, 9 aa, Homo sapiens
QQYYNNQWT

SEQ ID NO: 3321 - protein, 9 aa, Homo sapiens
QQSFVSPRT

SEQ ID NO: 3322 - protein, 9 aa, Homo sapiens
LQHKSYPLT

SEQ ID NO: 3323 - protein, 10 aa, Homo sapiens
QQYGSSPPLT

SEQ ID NO: 3324 - protein, 11 aa, Homo sapiens
AAWDDSLNGVV

SEQ ID NO: 3325 - protein, 9 aa, Homo sapiens
TQATQFPYT

SEQ ID NO: 3326 - protein, 9 aa, Homo sapiens
MQGTHWPPT

SEQ ID NO: 3327 - protein, 9 aa, Homo sapiens
MQGTHWPPT

SEQ ID NO: 3328 - protein, 10 aa, Homo sapiens
SSYTSSSIVV

SEQ ID NO: 3329 - protein, 9 aa, Homo sapiens
MQGTHWPPT

SEQ ID NO: 3330 - protein, 9 aa, Homo sapiens
LQHNSYPIT

SEQ ID NO: 3331 - protein, 11 aa, Homo sapiens
QSYDGSNHNVV

SEQ ID NO: 3332 - protein, 10 aa, Homo sapiens
QSYDSSNHVV

SEQ ID NO: 3333 - protein, 9 aa, Homo sapiens
QQYGSSPPT

SEQ ID NO: 3334 - protein, 9 aa, Homo sapiens
QQSYSIPRT

SEQ ID NO: 3335 - protein, 9 aa, Homo sapiens
LQHNSYPLT

SEQ ID NO: 3336 - protein, 9 aa, Homo sapiens
QAWDSSTGV

SEQ ID NO: 3337 - protein, 9 aa, Homo sapiens
HQYSKWPVT

SEQ ID NO: 3338 - protein, 8 aa, Homo sapiens
MQALQMGT

SEQ ID NO: 3339 - protein, 10 aa, Homo sapiens
QQSYSTPPYT

SEQ ID NO: 3340 - protein, 8 aa, Homo sapiens
QQYGSSRT

SEQ ID NO: 3341 - protein, 9 aa, Homo sapiens
QQYDTLPLT

SEQ ID NO: 3342 - protein, 9 aa, Homo sapiens
QQSYSTPRT

SEQ ID NO: 3343 - protein, 10 aa, Homo sapiens
QQLNSYPRMT

SEQ ID NO: 3344 - protein, 9 aa, Homo sapiens
QQRSNWPGT

SEQ ID NO: 3345 - protein, 9 aa, Homo sapiens
QQFNNFLLT

SEQ ID NO: 3346 - protein, 10 aa, Homo sapiens [sequence omitted]

SEQ ID NO: 3347 - protein, 11 aa, Homo sapiens
QVWDSSADHYV

SEQ ID NO: 3348 - protein, 12 aa, Homo sapiens
QSYDRSLSVLYV

SEQ ID NO: 3349 - protein, 9 aa, Homo sapiens
QQANSFRLT

SEQ ID NO: 3350 - protein, 9 aa, Homo sapiens
QQYGRSPYT

SEQ ID NO: 3351 - protein, 11 aa, Homo sapiens
NSRDSSGNTVV

SEQ ID NO: 3352 - protein, 9 aa, Homo sapiens
QQYHNLPIT

SEQ ID NO: 3353 - protein, 9 aa, Homo sapiens
HQSSSLPYT

SEQ ID NO: 3354 - protein, 11 aa, Homo sapiens
TTWDASRGGWV

SEQ ID NO: 3355 - protein, 9 aa, Homo sapiens
QQYHNVPPA

SEQ ID NO: 3356 - protein, 10 aa, Homo sapiens
QQSYSSPPWT

SEQ ID NO: 3357 - protein, 11 aa, Homo sapiens
AAWDDSLSGPV

SEQ ID NO: 3358 - protein, 9 aa, Homo sapiens
QHLNIDPIT

SEQ ID NO: 3359 - protein, 8 aa, Homo sapiens
QQRGNSIT

SEQ ID NO: 3360 - protein, 10 aa, Homo sapiens
QQSYNTLALS

SEQ ID NO: 3361 - protein, 9 aa, Homo sapiens
QQYADLPYT

SEQ ID NO: 3362 - protein, 9 aa, Homo sapiens
QQSYSPPHS

SEQ ID NO: 3363 - protein, 9 aa, Homo sapiens
QQSYSTPCT

SEQ ID NO: 3364 - protein, 10 aa, Homo sapiens
QQYYITPQLT

SEQ ID NO: 3365 - protein, 8 aa, Homo sapiens
QQYYGYPT

SEQ ID NO: 3366 - protein, 10 aa, Homo sapiens
QQSYSAPPWT

SEQ ID NO: 3367 - protein, 8 aa, Homo sapiens
QQYGSSRT

SEQ ID NO: 3368 - protein, 12 aa, Homo sapiens
QSYDSSLSGSWV

SEQ ID NO: 3369 - protein, 10 aa, Homo sapiens
VLYMGSGIVV

SEQ ID NO: 3370 - protein, 10 aa, Homo sapiens
MQGTHWPPGT

SEQ ID NO: 3371 - protein, 9 aa, Homo sapiens
QQYDNLPRT

SEQ ID NO: 3372 - protein, 11 aa, Homo sapiens
QVWDSSSDPYV

SEQ ID NO: 3373 - protein, 8 aa, Homo sapiens
QQYNNLYT

SEQ ID NO: 3374 - protein, 10 aa, Homo sapiens
QHYNNWPLYT

SEQ ID NO: 3375 - protein, 10 aa, Homo sapiens
MQGTHWPPGT

SEQ ID NO: 3376 - protein, 9 aa, Homo sapiens
QQYDNLPLT

SEQ ID NO: 3377 - protein, 9 aa, Homo sapiens
QQYNSYSHT

SEQ ID NO: 3378 - protein, 10 aa, Homo sapiens
QQSYSTPPYT

SEQ ID NO: 3379 - protein, 9 aa, Homo sapiens
QQTYSTPRT

SEQ ID NO: 3380 - protein, 10 aa, Homo sapiens
QQLNSYPPIT

SEQ ID NO: 3381 - protein, 11 aa, Homo sapiens
AAWDDSLNGWV

SEQ ID NO: 3382 - protein, 11 aa, Homo sapiens
ATWDDSLNGRV

SEQ ID NO: 3383 - protein, 9 aa, Homo sapiens
QQYGSSPRT

SEQ ID NO: 3384 - protein, 11 aa, Homo sapiens
NSRDSSGNHWV

SEQ ID NO: 3385 - protein, 10 aa, Homo sapiens
QQYNSYSPLT

SEQ ID NO: 3386 - protein, 8 aa, Homo sapiens
QQYYSFWA

SEQ ID NO: 3387 - protein, 9 aa, Homo sapiens
QLLNTDPIT

SEQ ID NO: 3388 - protein, 9 aa, Homo sapiens
QQSYSTPLT

SEQ ID NO: 3389 - protein, 11 aa, Homo sapiens
AAWDDSLNGWV

SEQ ID NO: 3390 - protein, 11 aa, Homo sapiens
AVWDDSLNGWV

SEQ ID NO: 3391 - protein, 9 aa, Homo sapiens
QQSYSIPRT

SEQ ID NO: 3392 - protein, 9 aa, Homo sapiens
QQYGSSPWT

SEQ ID NO: 3393 - protein, 5 aa, Homo sapiens
QQLGT

SEQ ID NO: 3394 - protein, 8 aa, Homo sapiens
QQTNSFPT

SEQ ID NO: 3395 - protein, 9 aa, Homo sapiens
QQYDNSPWT

SEQ ID NO: 3396 - protein, 9 aa, Homo sapiens
QQSDNVPVT

SEQ ID NO: 3397 - protein, 9 aa, Homo sapiens
QSYDSALVV

SEQ ID NO: 3398 - protein, 11 aa, Homo sapiens
QSYDSSLSVVV

SEQ ID NO: 3399 - protein, 11 aa, Homo sapiens
SSFTSSSTPYV

SEQ ID NO: 3400 - protein, 11 aa, Homo sapiens
AAWDDSLNGPV

SEQ ID NO: 3401 - protein, 10 aa, Homo sapiens
QQSYNTPPWT

SEQ ID NO: 3402 - protein, 11 aa, Homo sapiens
AAWDDSLSRVV

SEQ ID NO: 3403 - protein, 11 aa, Homo sapiens
AAWDDSLSGVI

SEQ ID NO: 3404 - protein, 9 aa, Homo sapiens
MQALQTPRT

SEQ ID NO: 3405 - protein, 10 aa, Homo sapiens
CMQGTHWPPT

SEQ ID NO: 3406 - protein, 10 aa, Homo sapiens
MQGTHWPMYT

SEQ ID NO: 3407 - protein, 9 aa, Homo sapiens
QQHDNVPLT

SEQ ID NO: 3408 - protein, 10 aa, Homo sapiens
QQLNSYPPYT

SEQ ID NO: 3409 - protein, 9 aa, Homo sapiens
QQLNSYPFT

SEQ ID NO: 3410 - protein, 9 aa, Homo sapiens
QQLNSYPLT

SEQ ID NO: 3411 - protein, 10 aa, Homo sapiens
QQSYSTPPDT

SEQ ID NO: 3412 - protein, 10 aa, Homo sapiens
QQSYTTPLFT

SEQ ID NO: 3413 - protein, 10 aa, Homo sapiens
QQSYTTPLFT

SEQ ID NO: 3414 - protein, 9 aa, Homo sapiens
HQYDNLPPT

SEQ ID NO: 3415 - protein, 9 aa, Homo sapiens
QQLNSYPLT

SEQ ID NO: 3416 - protein, 10 aa, Homo sapiens
QQLNSNPPIT

SEQ ID NO: 3417 - protein, 10 aa, Homo sapiens
QQSYSTPPYT

SEQ ID NO: 3418 - protein, 9 aa, Homo sapiens
QQYNSYPYT

SEQ ID NO: 3419 - protein, 9 aa, Homo sapiens
QQSYSTPRT

SEQ ID NO: 3420 - protein, 9 aa, Homo sapiens
QQYGSSPRT

SEQ ID NO: 3421 - protein, 9 aa, Homo sapiens
QQYDNLPIT

SEQ ID NO: 3422 - protein, 9 aa, Homo sapiens
QQYGSSPWT

SEQ ID NO: 3423 - protein, 11 aa, Homo sapiens
AAWDDSLNGPV

SEQ ID NO: 3424 - protein, 8 aa, Homo sapiens
QQYNSYWT

SEQ ID NO: 3425 - protein, 10 aa, Homo sapiens
SSDAGSNNVV

SEQ ID NO: 3426 - protein, 10 aa, Homo sapiens
QQSYSTPPWT

SEQ ID NO: 3427 - protein, 9 aa, Homo sapiens
QQRSNWPLT

SEQ ID NO: 3428 - protein, 9 aa, Homo sapiens
QQYDNLPPT

SEQ ID NO: 3429 - protein, 5 aa, Homo sapiens
QQRIT

SEQ ID NO: 3430 - protein, 10 aa, Homo sapiens
QQSYSTPPAT

SEQ ID NO: 3431 - protein, 11 aa, Homo sapiens
QVWDSSSDHVV

SEQ ID NO: 3432 - protein, 9 aa, Homo sapiens
MQALQTPFT

SEQ ID NO: 3433 - protein, 9 aa, Homo sapiens
QQYNNYRYT

SEQ ID NO: 3434 - protein, 8 aa, Homo sapiens
QQYNSYST

SEQ ID NO: 3435 - protein, 9 aa, Homo sapiens
MQALQTPHT

SEQ ID NO: 3436 - protein, 8 aa, Homo sapiens
QQYNSYST

SEQ ID NO: 3437 - protein, 10 aa, Homo sapiens
QQSYSTPPLT

SEQ ID NO: 3438 - protein, 9 aa, Homo sapiens
QQYGSSPRT

SEQ ID NO: 3439 - protein, 9 aa, Homo sapiens
QQYGSSPRT

SEQ ID NO: 3440 - protein, 9 aa, Homo sapiens
QQYTTTPRT

SEQ ID NO: 3441 - protein, 9 aa, Homo sapiens
QQYGTTPRT

SEQ ID NO: 3442 - protein, 11 aa, Homo sapiens
SSYEGSNNFVV

SEQ ID NO: 3443 - protein, 11 aa, Homo sapiens
QVWDSSRDHVV

SEQ ID NO: 3444 - protein, 12 aa, Homo sapiens
AAWDDSLSGFVV

SEQ ID NO: 3445 - protein, 10 aa, Homo sapiens
NSYTSSSTRV

SEQ ID NO: 3446 - protein, 11 aa, Homo sapiens
SSYAGSNNYVV

SEQ ID NO: 3447 - protein, 9 aa, Homo sapiens
QQYNSYPYT

SEQ ID NO: 3448 - protein, 12 aa, Homo sapiens
AAWDDSLNGAWV

SEQ ID NO: 3449 - protein, 10 aa, Homo sapiens
SSYTSSSTWV

SEQ ID NO: 3450 - protein, 9 aa, Homo sapiens
QQHNSSPLT

SEQ ID NO: 3451 - protein, 10 aa, Homo sapiens
QSYDSSLYAV

SEQ ID NO: 3452 - protein, 9 aa, Homo sapiens
MQVLQIPYT

SEQ ID NO: 3453 - protein, 11 aa, Homo sapiens
QSYDSGNHWVV

SEQ ID NO: 3454 - protein, 14 aa, Homo sapiens
GAWDSSLSAGGVYV

SEQ ID NO: 3455 - protein, 9 aa, Homo sapiens
QTWGTGILV

SEQ ID NO: 3456 - protein, 11 aa, Homo sapiens
SSYTSSSTSVV

SEQ ID NO: 3457 - protein, 9 aa, Homo sapiens
QQYDNLPQT

SEQ ID NO: 3458 - protein, 10 aa, Homo sapiens
CSYAGSSTLV

SEQ ID NO: 3459 - protein, 9 aa, Homo sapiens
QQLNSDSYT

SEQ ID NO: 3460 - protein, 9 aa, Homo sapiens
QQLNSYPPA

SEQ ID NO: 3461 - protein, 11 aa, Homo sapiens
QQRNNWPPEWT

SEQ ID NO: 3462 - protein, 9 aa, Homo sapiens
QQYGSSPWT

SEQ ID NO: 3463 - protein, 9 aa, Homo sapiens
QSYDSSNLV

SEQ ID NO: 3464 - protein, 11 aa, Homo sapiens
AAWDDSLNGVV

SEQ ID NO: 3465 - protein, 10 aa, Homo sapiens
QQYGSSRALT

SEQ ID NO: 3466 - protein, 13 aa, Homo sapiens
QVWDSSSDHPGVV

SEQ ID NO: 3467 - protein, 9 aa, Homo sapiens
QQYNNWPIT

SEQ ID NO: 3468 - protein, 10 aa, Homo sapiens
SSYTSSSTLL

SEQ ID NO: 3469 - protein, 10 aa, Homo sapiens
QQSYSTPPWT

SEQ ID NO: 3470 - protein, 13 aa, Homo sapiens
QVWDSSSDRPGVV

SEQ ID NO: 3471 - protein, 9 aa, Homo sapiens
QQYNSYPWT

SEQ ID NO: 3472 - protein, 9 aa, Homo sapiens
QSYDSSNWV

SEQ ID NO: 3473 - protein, 9 aa, Homo sapiens
QQYDNLPLT

SEQ ID NO: 3474 - protein, 9 aa, Homo sapiens
QQLNSYSYT

SEQ ID NO: 3475 - protein, 9 aa, Homo sapiens
QSYDSSNWV

SEQ ID NO: 3476 - protein, 10 aa, Homo sapiens
CSYAGASTFV

SEQ ID NO: 3477 - protein, 10 aa, Homo sapiens
SSYTSSSTRV

SEQ ID NO: 3478 - protein, 10 aa, Homo sapiens
SSYTSSTTRV

SEQ ID NO: 3479 - protein, 11 aa, Homo sapiens
SSYRGSSTPYV

SEQ ID NO: 3480 - protein, 10 aa, Homo sapiens
LLSYSGARPV

SEQ ID NO: 3481 - protein, 10 aa, Homo sapiens
QQYNNWPPLT

SEQ ID NO: 3482 - protein, 10 aa, Homo sapiens
SSYRSSSTLV

SEQ ID NO: 3483 - protein, 10 aa, Homo sapiens
QSYDSSNYWV

SEQ ID NO: 3484 - protein, 10 aa, Homo sapiens
CSYAGSSTWV

SEQ ID NO: 3485 - protein, 9 aa, Homo sapiens
QQYDNLPIT

SEQ ID NO: 3486 - protein, 9 aa, Homo sapiens
QQYNNWPRT

SEQ ID NO: 3487 - protein, 11 aa, Homo sapiens
QVWDSSSDPWV

SEQ ID NO: 3488 - protein, 10 aa, Homo sapiens
CSYAGASTFV

SEQ ID NO: 3489 - protein, 9 aa, Homo sapiens
QQYGSSPWT

SEQ ID NO: 3490 - protein, 9 aa, Homo sapiens
QQANSFPLT

SEQ ID NO: 3491 - protein, 9 aa, Homo sapiens
QQYDNLPRS

SEQ ID NO: 3492 - protein, 10 aa, Homo sapiens
QQSYSTPPWT

SEQ ID NO: 3493 - protein, 9 aa, Homo sapiens
QQYVSSPWT

SEQ ID NO: 3494 - protein, 9 aa, Homo sapiens
QQRSNWPRG

SEQ ID NO: 3495 - protein, 8 aa, Homo sapiens
QQYGSSLT

SEQ ID NO: 3496 - protein, 10 aa, Homo sapiens
QQLNSYPQGT

SEQ ID NO: 3497 - protein, 9 aa, Homo sapiens
QQYNNWPRT

SEQ ID NO: 3498 - protein, 10 aa, Homo sapiens
CSYAGSSTRL

SEQ ID NO: 3499 - protein, 10 aa, Homo sapiens
QQSYSTPPWT

SEQ ID NO: 3500 - protein, 10 aa, Homo sapiens
QQSYSTPPWT

SEQ ID NO: 3501 - protein, 10 aa, Homo sapiens
QQSYSTPPIT

SEQ ID NO: 3502 - protein, 8 aa, Homo sapiens
QQRRNWGT

SEQ ID NO: 3503 - protein, 11 aa, Homo sapiens
QQSYSTPPEYT

SEQ ID NO: 3504 - protein, 11 aa, Homo sapiens
QQLNSYPPKFT

SEQ ID NO: 3505 - protein, 10 aa, Homo sapiens
SSYAGSSTQV

SEQ ID NO: 3506 - protein, 10 aa, Homo sapiens
SSYTSSSAQL

SEQ ID NO: 3507 - protein, 10 aa, Homo sapiens
SSYTSGSTQV

SEQ ID NO: 3508 - protein, 9 aa, Homo sapiens
QQYDNLPIT

SEQ ID NO: 3509 - protein, 9 aa, Homo sapiens
MQGTHWPPT

SEQ ID NO: 3510 - protein, 11 aa, Homo sapiens
QSYDSSLSGVV

SEQ ID NO: 3511 - protein, 11 aa, Homo sapiens
QVWDSSSDPWV

SEQ ID NO: 3512 - protein, 12 aa, Homo sapiens
QVWDSSSDHPVV

SEQ ID NO: 3513 - protein, 13 aa, Homo sapiens
QSYDSSNHEEIWV

SEQ ID NO: 3514 - protein, 11 aa, Homo sapiens
QVWDNNSDHLV

SEQ ID NO: 3515 - protein, 9 aa, Homo sapiens
QQYGSSPRT

SEQ ID NO: 3516 - protein, 12 aa, Homo sapiens
AAWDDSLSGRVV

SEQ ID NO: 3517 - protein, 11 aa, Homo sapiens
AAWDDSLNGPV

SEQ ID NO: 3518 - protein, 12 aa, Homo sapiens
QSADSSGTYLVV

SEQ ID NO: 3519 - protein, 9 aa, Homo sapiens
QQSYSTPWT

SEQ ID NO: 3520 - protein, 11 aa, Homo sapiens
AAWDDSLNGPV

SEQ ID NO: 3521 - protein, 11 aa, Homo sapiens
LLYYGGAQRWV

SEQ ID NO: 3522 - protein, 10 aa, Homo sapiens
YSYAGSSTFV

SEQ ID NO: 3523 - protein, 11 aa, Homo sapiens
AAWDDSLSGWV

SEQ ID NO: 3524 - protein, 9 aa, Homo sapiens
QQYGSSPRT

SEQ ID NO: 3525 - protein, 10 aa, Homo sapiens
TSYAGSNNFV

SEQ ID NO: 3526 - protein, 10 aa, Homo sapiens
SSYTSSSTQV

SEQ ID NO: 3527 - protein, 10 aa, Homo sapiens
SSYTSSSTQV

SEQ ID NO: 3528 - protein, 10 aa, Homo sapiens
SSYTVSSTQV

SEQ ID NO: 3529 - protein, 10 aa, Homo sapiens
SSYTSSSAQL

SEQ ID NO: 3530 - protein, 10 aa, Homo sapiens
SSYTSSSAQV

SEQ ID NO: 3531 - protein, 9 aa, Homo sapiens
QQSYSTPPT

SEQ ID NO: 3532 - protein, 9 aa, Homo sapiens
QQSYSTPRT

SEQ ID NO: 3533 - protein, 10 aa, Homo sapiens
LQHNSYPILT

SEQ ID NO: 3534 - protein, 12 aa, Homo sapiens
QVWDSSSDHPYV

SEQ ID NO: 3535 - protein, 9 aa, Homo sapiens
QHYGSSLWT

SEQ ID NO: 3536 - protein, 9 aa, Mus musculus
FQGSHVPLT

SEQ ID NO: 3537 - protein, 11 aa, Homo sapiens
QQRSNWPPALT

SEQ ID NO: 3538 - protein, 10 aa, Homo sapiens
CSYAGSSTWV

SEQ ID NO: 3539 - protein, 9 aa, Homo sapiens
MQALQTPGT

SEQ ID NO: 3540 - protein, 9 aa, Homo sapiens
MQALQTPGT

SEQ ID NO: 3541 - protein, 10 aa, Homo sapiens
CSYAGVRTVV

SEQ ID NO: 3542 - protein, 10 aa, Homo sapiens
CSYAGVRTVV

SEQ ID NO: 3543 - protein, 9 aa, Homo sapiens
QQYGSSPWT

SEQ ID NO: 3544 - protein, 9 aa, Homo sapiens
QQYDNLLFT

SEQ ID NO: 3545 - protein, 11 aa, Homo sapiens
SSYTSSSTLWV

SEQ ID NO: 3546 - protein, 8 aa, Homo sapiens
QQSYSTFT

SEQ ID NO: 3547 - protein, 9 aa, Homo sapiens
QQYYTAPLT

SEQ ID NO: 3548 - protein, 10 aa, Homo sapiens
QQRSNWPPYT

SEQ ID NO: 3549 - protein, 10 aa, Homo sapiens
SSYTSSTTWV

SEQ ID NO: 3550 - protein, 12 aa, Homo sapiens
QSFDSSLSGSDV

SEQ ID NO: 3551 - protein, 12 aa, Homo sapiens
AAWDASLSGHVV

SEQ ID NO: 3552 - protein, 9 aa, Homo sapiens
MQRIEFPWT

SEQ ID NO: 3553 - protein, 9 aa, Homo sapiens
QQYYTAPLT

SEQ ID NO: 3554 - protein, 9 aa, Homo sapiens
QQYNSYPWT

SEQ ID NO: 3555 - protein, 12 aa, Homo sapiens
QSADSSGTYFWV

SEQ ID NO: 3556 - protein, 9 aa, Homo sapiens
QQYYTAPLT

SEQ ID NO: 3557 - protein, 11 aa, Homo sapiens
SVWDDSLNGPL

SEQ ID NO: 3558 - protein, 9 aa, Homo sapiens
QSSDSSGVV

SEQ ID NO: 3559 - protein, 9 aa, Homo sapiens
QQYNSYSWT

SEQ ID NO: 3560 - protein, 11 aa, Homo sapiens
SVWDDSLNGPL

SEQ ID NO: 3561 - protein, 9 aa, Homo sapiens
QQSYSTPPT

SEQ ID NO: 3562 - protein, 9 aa, Homo sapiens
QQSYNTPRT

SEQ ID NO: 3563 - protein, 8 aa, Homo sapiens
QQTNSFPT

SEQ ID NO: 3564 - protein, 8 aa, Homo sapiens
QQYGNSPQ

SEQ ID NO: 3565 - protein, 10 aa, Homo sapiens
QQYNSYSTWT

SEQ ID NO: 3566 - protein, 9 aa, Homo sapiens
QQSYNTPYT

SEQ ID NO: 3567 - protein, 11 aa, Homo sapiens
AAWDDSLNALV

SEQ ID NO: 3568 - protein, 9 aa, Homo sapiens
QQSYSTPGT

SEQ ID NO: 3569 - protein, 10 aa, Homo sapiens
QQSDNLPMYT

SEQ ID NO: 3570 - protein, 12 aa, Homo sapiens
QVWDSSSDHHVV

SEQ ID NO: 3571 - protein, 11 aa, Homo sapiens
LVWDDSLNGLV

SEQ ID NO: 3572 - protein, 12 aa, Homo sapiens
QSYDSRLSGFVV

SEQ ID NO: 3573 - protein, 9 aa, Homo sapiens
QQSYTTLLT

SEQ ID NO: 3574 - protein, 9 aa, Homo sapiens
QQYGSSPWT

SEQ ID NO: 3575 - protein, 11 aa, Homo sapiens
QSYDSSLSDSV

SEQ ID NO: 3576 - protein, 9 aa, Homo sapiens
QLLNSHPLT

SEQ ID NO: 3577 - protein, 11 aa, Homo sapiens
NSRDSSGNAVV

SEQ ID NO: 3578 - protein, 9 aa, Homo sapiens
QQYANLPFT

SEQ ID NO: 3579 - protein, 11 aa, Homo sapiens
NSRDSSGNAVV

SEQ ID NO: 3580 - protein, 11 aa, Homo sapiens
AVWDDSLNGLV

SEQ ID NO: 3581 - protein, 9 aa, Homo sapiens
QQSYSTPWT

SEQ ID NO: 3582 - protein, 9 aa, Homo sapiens
HQYNNWPQT

SEQ ID NO: 3583 - protein, 11 aa, Homo sapiens
QSYDGINRAWV

SEQ ID NO: 3584 - protein, 9 aa, Homo sapiens
MQALQTPLT

SEQ ID NO: 3585 - protein, 10 aa, Homo sapiens
QQSYSSLSIT

SEQ ID NO: 3586 - protein, 10 aa, Homo sapiens
QQSYEIPPWT

SEQ ID NO: 3587 - protein, 9 aa, Homo sapiens
QQYDNLPPV

SEQ ID NO: 3588 - protein, 11 aa, Homo sapiens
QSYDSSLSGSV

SEQ ID NO: 3589 - protein, 9 aa, Homo sapiens
QSYDSGNPI

SEQ ID NO: 3590 - protein, 8 aa, Homo sapiens
QQYYSTLT

SEQ ID NO: 3591 - protein, 9 aa, Homo sapiens
QQYDNLPPV

SEQ ID NO: 3592 - protein, 11 aa, Homo sapiens
QSYDGINRWLV

SEQ ID NO: 3593 - protein, 14 aa, Homo sapiens
GADHGSGSNFEYVV

SEQ ID NO: 3594 - protein, 11 aa, Homo sapiens
AAWDDSLNGYV

SEQ ID NO: 3595 - protein, 9 aa, Homo sapiens
QQLNSYPVT

SEQ ID NO: 3596 - protein, 12 aa, Homo sapiens
SSYTSSSTLLYV

SEQ ID NO: 3597 - protein, 12 aa, Homo sapiens
QVWDSSSDHPGV

SEQ ID NO: 3598 - protein, 11 aa, Homo sapiens
HYRSNWPPVLT

SEQ ID NO: 3599 - protein, 10 aa, Homo sapiens
QQYDNLYSVH

SEQ ID NO: 3600 - protein, 12 aa, Homo sapiens
SSYTSSSTLLYV

SEQ ID NO: 3601 - protein, 12 aa, Homo sapiens
SSYTSSSTLLYV

SEQ ID NO: 3602 - protein, 9 aa, Homo sapiens
QLLNSHPLT

SEQ ID NO: 3603 - protein, 11 aa, Homo sapiens
QHRTNWPPLFT

SEQ ID NO: 3604 - protein, 9 aa, Homo sapiens
QAWDSSTGV

SEQ ID NO: 3605 - protein, 9 aa, Homo sapiens
QQYNTYSGT

SEQ ID NO: 3606 - protein, 9 aa, Homo sapiens
QAWDSSTGV

SEQ ID NO: 3607 - protein, 9 aa, Homo sapiens
QQTYSTFWT

SEQ ID NO: 3608 - protein, 9 aa, Homo sapiens
QAWDSSTAV

SEQ ID NO: 3609 - protein, 10 aa, Homo sapiens
SSYTSSRAVL

SEQ ID NO: 3610 - protein, 13 aa, Homo sapiens
QVWDSSSDHPEWV

SEQ ID NO: 3611 - protein, 8 aa, Homo sapiens
QQSYSTPT

SEQ ID NO: 3612 - protein, 11 aa, Homo sapiens
SSYTSSSTHVV

SEQ ID NO: 3613 - protein, 9 aa, Homo sapiens
QQYNTYSGT

SEQ ID NO: 3614 - protein, 9 aa, Homo sapiens
QQYYTAPLT

SEQ ID NO: 3615 - protein, 10 aa, Homo sapiens
QHYGSSRGWT

SEQ ID NO: 3616 - protein, 9 aa, Homo sapiens
QQYGRSPIT

SEQ ID NO: 3617 - protein, 9 aa, Homo sapiens
QAWDSSTVV

SEQ ID NO: 3618 - protein, 9 aa, Homo sapiens
QQSYSTPYT

SEQ ID NO: 3619 - protein, 10 aa, Homo sapiens
QSYDSSLGAL

SEQ ID NO: 3620 - protein, 9 aa, Homo sapiens
QQANSFPPT

SEQ ID NO: 3621 - protein, 8 aa, Homo sapiens
QQRGNWWT

SEQ ID NO: 3622 - protein, 11 aa, Homo sapiens
QHRTNWPPLFT

SEQ ID NO: 3623 - protein, 10 aa, Homo sapiens
QQCYNWPPWT

SEQ ID NO: 3624 - protein, 11 aa, Homo sapiens
HKRSNWPPSLT

SEQ ID NO: 3625 - protein, 9 aa, Homo sapiens
QQYYSISWT

SEQ ID NO: 3626 - protein, 11 aa, Homo sapiens
CSYAVSTTYVI

SEQ ID NO: 3627 - protein, 9 aa, Homo sapiens
QQYYSTPWT

SEQ ID NO: 3628 - protein, 14 aa, Homo sapiens
GADHGSGSNFVFVV

SEQ ID NO: 3629 - protein, 9 aa, Homo sapiens
MQALQTPFT

SEQ ID NO: 3630 - protein, 10 aa, Homo sapiens
QQYNYWPPLT

SEQ ID NO: 3631 - protein, 12 aa, Homo sapiens
QVWDSSSDHHVV

SEQ ID NO: 3632 - protein, 9 aa, Homo sapiens
QQYNTYSQT

SEQ ID NO: 3633 - protein, 10 aa, Homo sapiens
QAWDNDAGVV

SEQ ID NO: 3634 - protein, 9 aa, Homo sapiens
QQYNSHPPT

SEQ ID NO: 3635 - protein, 10 aa, Homo sapiens
SAYAGSNNLV

SEQ ID NO: 3636 - protein, 14 aa, Homo sapiens
GADHGSGSNFEYVV

SEQ ID NO: 3637 - protein, 8 aa, Homo sapiens
CSYAGIVL

SEQ ID NO: 3638 - protein, 11 aa, Homo sapiens
QSGDSSGTYVV

SEQ ID NO: 3639 - protein, 13 aa, Homo sapiens
QSVDRSGTYFNWV

SEQ ID NO: 3640 - protein, 9 aa, Homo sapiens
QQSYSTPYT

SEQ ID NO: 3641 - protein, 9 aa, Homo sapiens
LLYYGGAWV

SEQ ID NO: 3642 - protein, 11 aa, Homo sapiens
QSYDGSNHAVV

SEQ ID NO: 3643 - protein, 11 aa, Homo sapiens
QVWDSSSDPVV

SEQ ID NO: 3644 - protein, 9 aa, Homo sapiens
MQALQTPQT

SEQ ID NO: 3645 - protein, 8 aa, Homo sapiens
QQYGGSLT

SEQ ID NO: 3646 - protein, 9 aa, Homo sapiens
QAWDSSLVV

SEQ ID NO: 3647 - protein, 10 aa, Homo sapiens
SSYTSSSLRV

SEQ ID NO: 3648 - protein, 9 aa, Homo sapiens
QQLNSYPVT

SEQ ID NO: 3649 - protein, 10 aa, Homo sapiens
CSYAGSYTYV

SEQ ID NO: 3650 - protein, 11 aa, Homo sapiens
SSYTSSSTLVL

SEQ ID NO: 3651 - protein, 11 aa, Homo sapiens
QQRSNWPPSYT

SEQ ID NO: 3652 - protein, 10 aa, Homo sapiens
SSYTSISTWV

SEQ ID NO: 3653 - protein, 11 aa, Homo sapiens
FSMDSSGDLRV

SEQ ID NO: 3654 - protein, 10 aa, Homo sapiens
QQSYSTPGLT

SEQ ID NO: 3655 - protein, 10 aa, Homo sapiens
ISYTSSRTLV

SEQ ID NO: 3656 - protein, 12 aa, Homo sapiens
QVWDSSYYHPVV

SEQ ID NO: 3657 - protein, 11 aa, Homo sapiens
LVWDDSLNGLV

SEQ ID NO: 3658 - protein, 11 aa, Homo sapiens
GTWDSSLSAVV

SEQ ID NO: 3659 - protein, 9 aa, Homo sapiens
QQYSIYSWT

SEQ ID NO: 3660 - protein, 9 aa, Homo sapiens
QQSYSTPWT

SEQ ID NO: 3661 - protein, 9 aa, Homo sapiens
QQANSLPLT

SEQ ID NO: 3662 - protein, 11 aa, Homo sapiens
AAWDDSLNGVV

SEQ ID NO: 3663 - protein, 11 aa, Homo sapiens
AAWDDSLNGWV

SEQ ID NO: 3664 - protein, 9 aa, Homo sapiens
QAWDSSTAV

SEQ ID NO: 3665 - protein, 9 aa, Homo sapiens
HQYNNWPQT

SEQ ID NO: 3666 - protein, 8 aa, Homo sapiens
QQSYSTLT

SEQ ID NO: 3667 - protein, 11 aa, Homo sapiens
QHRSNWPPRLT

SEQ ID NO: 3668 - protein, 9 aa, Homo sapiens
QQSYSTPGT

SEQ ID NO: 3669 - protein, 8 aa, Homo sapiens
QQYGSSYT

SEQ ID NO: 3670 - protein, 9 aa, Homo sapiens
QQTYSTFWT

SEQ ID NO: 3671 - protein, 11 aa, Homo sapiens
AAWDDSLSSWV

SEQ ID NO: 3672 - protein, 9 aa, Homo sapiens
QSYDSGNPI

SEQ ID NO: 3673 - protein, 9 aa, Homo sapiens
QAWSSSTAV

SEQ ID NO: 3674 - protein, 11 aa, Homo sapiens
SSYTSSTLNVL

SEQ ID NO: 3675 - protein, 9 aa, Homo sapiens
QQSYSTPGT

SEQ ID NO: 3676 - protein, 12 aa, Homo sapiens
QSYDSSLSGWSV

SEQ ID NO: 3677 - protein, 12 aa, Homo sapiens
SSYTSSSTLLYV

SEQ ID NO: 3678 - protein, 10 aa, Homo sapiens
QQSYSTHMST

SEQ ID NO: 3679 - protein, 7 aa, Homo sapiens
MQSIQLA

SEQ ID NO: 3680 - protein, 10 aa, Homo sapiens
QQYNYWPPLT

SEQ ID NO: 3681 - protein, 12 aa, Homo sapiens
SSGDSSTDHHVV

SEQ ID NO: 3682 - protein, 9 aa, Homo sapiens
HQSYGVPIT

SEQ ID NO: 3683 - protein, 11 aa, Homo sapiens
QQYNNWPPMYT

SEQ ID NO: 3684 - protein, 10 aa, Homo sapiens
QSYDSSKYVV

SEQ ID NO: 3685 - protein, 9 aa, Homo sapiens
QQYGSSPWT

SEQ ID NO: 3686 - protein, 10 aa, Homo sapiens
MQALQTPLYT

SEQ ID NO: 3687 - protein, 10 aa, Homo sapiens
QQSYSSLSIT

SEQ ID NO: 3688 - protein, 11 aa, Homo sapiens
HKRSNWPPSLT

SEQ ID NO: 3689 - protein, 11 aa, Homo sapiens
QSTASSGTYVV

SEQ ID NO: 3690 - protein, 9 aa, Homo sapiens
QQYNSYSPT

SEQ ID NO: 3691 - protein, 11 aa, Homo sapiens
QSYDGINRWLV

SEQ ID NO: 3692 - protein, 9 aa, Homo sapiens
QQYNNWPGT

SEQ ID NO: 3693 - protein, 10 aa, Homo sapiens
QQYGSSPPYT

SEQ ID NO: 3694 - protein, 14 aa, Homo sapiens
GADHGSGSNFVYVV

SEQ ID NO: 3695 - protein, 10 aa, Homo sapiens
QHFGSSSQWT

SEQ ID NO: 3696 - protein, 9 aa, Homo sapiens
LLYYGGPWV

SEQ ID NO: 3697 - protein, 9 aa, Homo sapiens
QQYNNWPLA

SEQ ID NO: 3698 - protein, 11 aa, Homo sapiens
CSYAGGNTFVV

SEQ ID NO: 3699 - protein, 9 aa, Homo sapiens
QQYNNWPRT

SEQ ID NO: 3700 - protein, 11 aa, Homo sapiens
SSYTSSSTPVV

SEQ ID NO: 3701 - protein, 9 aa, Homo sapiens
MQALQTPRT

SEQ ID NO: 3702 - protein, 9 aa, Homo sapiens
QQSYSTPWT

SEQ ID NO: 3703 - protein, 11 aa, Homo sapiens
AVWDDSLNGLV

SEQ ID NO: 3704 - protein, 10 aa, Homo sapiens
QQCYNWPPWT

SEQ ID NO: 3705 - protein, 9 aa, Homo sapiens
QAWDSSTGV

SEQ ID NO: 3706 - protein, 9 aa, Homo sapiens
QQYHNLPRT

SEQ ID NO: 3707 - protein, 9 aa, Homo sapiens
QQLNSYPFT

SEQ ID NO: 3708 - protein, 9 aa, Homo sapiens
QQYYSISWT

SEQ ID NO: 3709 - protein, 11 aa, Homo sapiens
SSYTSSSTLYV

SEQ ID NO: 3710 - protein, 9 aa, Homo sapiens
QKYNSAPWT

SEQ ID NO: 3711 - protein, 9 aa, Homo sapiens
QAWDSSTGV

SEQ ID NO: 3712 - protein, 9 aa, Homo sapiens
QQLNSYPIT

SEQ ID NO: 3713 - protein, 11 aa, Homo sapiens
AVWDDSLNGLV

SEQ ID NO: 3714 - protein, 11 aa, Homo sapiens
AAWDDSLNGVV

SEQ ID NO: 3715 - protein, 9 aa, Homo sapiens
QQSYTTLLT

SEQ ID NO: 3716 - protein, 11 aa, Homo sapiens
SSYTSTSTPWV

SEQ ID NO: 3717 - protein, 10 aa, Homo sapiens
QQYHVWPPIT

SEQ ID NO: 3718 - protein, 9 aa, Homo sapiens
QQYYSTPLT

SEQ ID NO: 3719 - protein, 9 aa, Homo sapiens
QQGNSFPLT

SEQ ID NO: 3720 - protein, 11 aa, Homo sapiens
QSYDSSLSAWV

SEQ ID NO: 3721 - protein, 9 aa, Homo sapiens
QQYNTYSQT

SEQ ID NO: 3722 - protein, 11 aa, Homo sapiens
QQRSNWPPGVT

SEQ ID NO: 3723 - protein, 9 aa, Homo sapiens
HQYDYLPYT

SEQ ID NO: 3724 - protein, 10 aa, Homo sapiens
QQTYSTPLYT

SEQ ID NO: 3725 - protein, 11 aa, Homo sapiens
QHRTNWPPLFT

SEQ ID NO: 3726 - protein, 11 aa, Homo sapiens
QSADSSGTYVV

SEQ ID NO: 3727 - protein, 9 aa, Homo sapiens
QQYNTYSGT

SEQ ID NO: 3728 - protein, 14 aa, Homo sapiens
GADHGSGSNFVFVV

SEQ ID NO: 3729 - protein, 9 aa, Homo sapiens
QQYYSPPWT

SEQ ID NO: 3730 - protein, 10 aa, Homo sapiens
QQYHNLPPIT

SEQ ID NO: 3731 - protein, 10 aa, Homo sapiens
QAWDSSTGGV

SEQ ID NO: 3732 - protein, 13 aa, Homo sapiens
QQYDNLPPGVSTT

SEQ ID NO: 3733 - protein, 11 aa, Homo sapiens
CSTDSSGNQRV

SEQ ID NO: 3734 - protein, 11 aa, Homo sapiens
SSYTSSSTHVV

SEQ ID NO: 3735 - protein, 11 aa, Homo sapiens
QSADTIGTYWV

SEQ ID NO: 3736 - protein, 11 aa, Homo sapiens
QQYNNWPPMYT

SEQ ID NO: 3737 - protein, 10 aa, Homo sapiens
QQYDNLYSVH

SEQ ID NO: 3738 - protein, 10 aa, Homo sapiens
QQSYEMPPWT

SEQ ID NO: 3739 - protein, 9 aa, Homo sapiens
QSADSSGYV

SEQ ID NO: 3740 - protein, 11 aa, Homo sapiens
SSYTSSSIPYV

SEQ ID NO: 3741 - protein, 8 aa, Homo sapiens
QQRGNWWT

SEQ ID NO: 3742 - protein, 11 aa, Homo sapiens
YSTDTSGNHWV

SEQ ID NO: 3743 - protein, 11 aa, Homo sapiens
YSTDSSGNHRV

SEQ ID NO: 3744 - protein, 9 aa, Homo sapiens
HQYGTSPYT

SEQ ID NO: 3745 - protein, 8 aa, Homo sapiens
QQYNNFLT

SEQ ID NO: 3746 - protein, 8 aa, Homo sapiens
QQYYSTPG

SEQ ID NO: 3747 - protein, 11 aa, Homo sapiens
QSYDSSLSDSV

SEQ ID NO: 3748 - protein, 11 aa, Homo sapiens
QSADSSGTSWV

SEQ ID NO: 3749 - protein, 9 aa, Homo sapiens
QQYGSSPFT

SEQ ID NO: 3750 - protein, 9 aa, Homo sapiens
QQYNSYSLT

SEQ ID NO: 3751 - protein, 9 aa, Homo sapiens
QQYNNWWRT

SEQ ID NO: 3752 - protein, 11 aa, Homo sapiens
YSTDSSGNHWV

SEQ ID NO: 3753 - protein, 11 aa, Homo sapiens
NFRDSSGHHPV

SEQ ID NO: 3754 - protein, 11 aa, Homo sapiens
AAWDDSLNALV

SEQ ID NO: 3755 - protein, 9 aa, Homo sapiens
QQYNNWPGT

SEQ ID NO: 3756 - protein, 9 aa, Homo sapiens
YSAADNNRV

SEQ ID NO: 3757 - protein, 11 aa, Homo sapiens
NSRDSSGNAVV

SEQ ID NO: 3758 - protein, 10 aa, Homo sapiens
QQYDNLLLFT

SEQ ID NO: 3759 - protein, 12 aa, Homo sapiens
QQRSNWPPRTWT

SEQ ID NO: 3760 - protein, 11 aa, Homo sapiens
HYRSNWPPVLT

SEQ ID NO: 3761 - protein, 11 aa, Homo sapiens
NSRDSSGNAVV

SEQ ID NO: 3762 - protein, 13 aa, Homo sapiens
NSRDSSGYIWGWM

SEQ ID NO: 3763 - protein, 11 aa, Homo sapiens
QVWDSSSDHWV

SEQ ID NO: 3764 - protein, 10 aa, Homo sapiens
QSYDSSLGAL

SEQ ID NO: 3765 - protein, 9 aa, Homo sapiens
QSWDTGIGV

SEQ ID NO: 3766 - protein, 9 aa, Homo sapiens
QAWDSSTVV

SEQ ID NO: 3767 - protein, 11 aa, Homo sapiens
CSYVGSSTYVV

SEQ ID NO: 3768 - protein, 10 aa, Homo sapiens
QSADSSSHWV

SEQ ID NO: 3769 - protein, 9 aa, Homo sapiens
QSFDSGNVV

SEQ ID NO: 3770 - protein, 11 aa, Homo sapiens
VAWDDSRNGLV

SEQ ID NO: 3771 - protein, 8 aa, Homo sapiens
QQYYSTRT

SEQ ID NO: 3772 - protein, 10 aa, Homo sapiens
QQYYSTPPYT

SEQ ID NO: 3773 - protein, 11 aa, Homo sapiens
LAWDDSLNGLV

SEQ ID NO: 3774 - protein, 11 aa, Homo sapiens
AAWDASLSGWV

SEQ ID NO: 3775 - protein, 11 aa, Homo sapiens
QSVDGSGSSVV

SEQ ID NO: 3776 - protein, 10 aa, Homo sapiens
QAWDSSTHVV

SEQ ID NO: 3777 - protein, 11 aa, Homo sapiens
SSYTSSSTPFV

SEQ ID NO: 3778 - protein, 9 aa, Homo sapiens
ETWDSNTRV

SEQ ID NO: 3779 - protein, 10 aa, Homo sapiens
QQSYSTPMHT

SEQ ID NO: 3780 - protein, 9 aa, Homo sapiens
QQLNSYLGT

SEQ ID NO: 3781 - protein, 9 aa, Homo sapiens
QQANSFPPT

SEQ ID NO: 3782 - protein, 11 aa, Homo sapiens
LVWDDSLNGLV

SEQ ID NO: 3783 - protein, 10 aa, Homo sapiens
CSYAGSSTWG

SEQ ID NO: 3784 - protein, 12 aa, Homo sapiens
QVWDSSSDHHVV

SEQ ID NO: 3785 - protein, 9 aa, Homo sapiens
MQALQTPLT

SEQ ID NO: 3786 - protein, 11 aa, Homo sapiens
QQYNNWPPMYT

SEQ ID NO: 3787 - protein, 9 aa, Homo sapiens
QQYNNWPRT

SEQ ID NO: 3788 - protein, 5 aa, Homo sapiens
QTWGT

SEQ ID NO: 3789 - protein, 9 aa, Homo sapiens
MQSIQPPLT

SEQ ID NO: 3790 - protein, 9 aa, Homo sapiens
QQYYSTPLT

SEQ ID NO: 3791 - protein, 11 aa, Homo sapiens
SSFTSRGALVL

SEQ ID NO: 3792 - protein, 8 aa, Homo sapiens
CSYAGIWV

SEQ ID NO: 3793 - protein, 9 aa, Homo sapiens
QHYGSSRST

SEQ ID NO: 3794 - protein, 8 aa, Homo sapiens
QQSYSTPT

SEQ ID NO: 3795 - protein, 9 aa, Homo sapiens
QQSYSTPYT

SEQ ID NO: 3796 - protein, 12 aa, Homo sapiens
NSRDSSGNHLRV

SEQ ID NO: 3797 - protein, 9 aa, Homo sapiens
QQYGRSPIT

SEQ ID NO: 3798 - protein, 10 aa, Homo sapiens
QQYDNLLQFT

SEQ ID NO: 3799 - protein, 9 aa, Homo sapiens
YSTDSSGNV

SEQ ID NO: 3800 - protein, 9 aa, Homo sapiens
QQYNSYSLT

SEQ ID NO: 3801 - protein, 9 aa, Homo sapiens
QYYGSSPFG

SEQ ID NO: 3802 - protein, 11 aa, Homo sapiens
QQRSNWPPRLT

SEQ ID NO: 3803 - protein, 11 aa, Homo sapiens
AVWDDSLNGVV

SEQ ID NO: 3804 - protein, 11 aa, Homo sapiens
LVWDDSLNGLV

SEQ ID NO: 3805 - protein, 10 aa, Homo sapiens
SSYTSSRAVL

SEQ ID NO: 3806 - protein, 9 aa, Homo sapiens
QQYYSSHWT

SEQ ID NO: 3807 - protein, 10 aa, Homo sapiens
YSYAGSSTWV

SEQ ID NO: 3808 - protein, 11 aa, Homo sapiens
QSTDSSGSYVV

SEQ ID NO: 3809 - protein, 9 aa, Homo sapiens
HQSYFTPQT

SEQ ID NO: 3810 - protein, 9 aa, Homo sapiens
QQYGNSPFT

SEQ ID NO: 3811 - protein, 9 aa, Homo sapiens
QQYVEPPFT

SEQ ID NO: 3812 - protein, 10 aa, Homo sapiens
SAYAGSNNLV

SEQ ID NO: 3813 - protein, 8 aa, Homo sapiens
QQYGSSYT

SEQ ID NO: 3814 - protein, 9 aa, Homo sapiens
QQSYSTPGT

SEQ ID NO: 3815 - protein, 9 aa, Homo sapiens
QQYGRSSGT

SEQ ID NO: 3816 - protein, 10 aa, Homo sapiens
QQYGSSPLIT

SEQ ID NO: 3817 - protein, 9 aa, Homo sapiens
QQYYTAPLT

SEQ ID NO: 3818 - protein, 9 aa, Homo sapiens
LLYYGGAWV

SEQ ID NO: 3819 - protein, 9 aa, Homo sapiens
HQSSSLPPT

SEQ ID NO: 3820 - protein, 10 aa, Homo sapiens
QRRSNWPPFT

SEQ ID NO: 3821 - protein, 10 aa, Homo sapiens
QSYDSSNYWV

SEQ ID NO: 3822 - protein, 11 aa, Homo sapiens
NSRDSSGNAVV

SEQ ID NO: 3823 - protein, 9 aa, Homo sapiens
QQYYSSPYT

SEQ ID NO: 3824 - protein, 9 aa, Homo sapiens
QQYNNWWRT

SEQ ID NO: 3825 - protein, 10 aa, Homo sapiens
QQYGSSPRLT

SEQ ID NO: 3826 - protein, 11 aa, Homo sapiens
AVWDDSLNGLV

SEQ ID NO: 3827 - protein, 11 aa, Homo sapiens
QSYDSSLNGDV

SEQ ID NO: 3828 - protein, 11 aa, Homo sapiens
QQRSNWPLIFT

SEQ ID NO: 3829 - protein, 11 aa, Homo sapiens
QSYDSSLSGYV

SEQ ID NO: 3830 - protein, 10 aa, Homo sapiens
QQSYSTPPIT

SEQ ID NO: 3831 - protein, 10 aa, Homo sapiens
QQSYSTPPWT

SEQ ID NO: 3832 - protein, 9 aa, Homo sapiens
QQYANLPFT

SEQ ID NO: 3833 - protein, 11 aa, Homo sapiens
VAWDDSRNGLV

SEQ ID NO: 3834 - protein, 13 aa, Homo sapiens
QSVDSSGTYPHVI

SEQ ID NO: 3835 - protein, 9 aa, Homo sapiens
QQSYSTPYT

SEQ ID NO: 3836 - protein, 9 aa, Homo sapiens
QQLNSYPLT

SEQ ID NO: 3837 - protein, 12 aa, Homo sapiens
TSYTSSSTLNVV

SEQ ID NO: 3838 - protein, 10 aa, Homo sapiens
CSYASSSIVV

SEQ ID NO: 3839 - protein, 10 aa, Homo sapiens
QQSYSTPPWT

SEQ ID NO: 3840 - protein, 10 aa, Homo sapiens
QQLNSYSFET

SEQ ID NO: 3841 - protein, 11 aa, Homo sapiens
QSYDGINRWLV

SEQ ID NO: 3842 - protein, 9 aa, Homo sapiens
QQYNSYPYT

SEQ ID NO: 3843 - protein, 9 aa, Homo sapiens
QQSSSSPIT

SEQ ID NO: 3844 - protein, 9 aa, Homo sapiens
QQSYTTLLT

SEQ ID NO: 3845 - protein, 11 aa, Homo sapiens
QVWDGINDRVV

SEQ ID NO: 3846 - protein, 9 aa, Homo sapiens
QQYDNLPPV

SEQ ID NO: 3847 - protein, 9 aa, Homo sapiens
QQSYSSEWT

SEQ ID NO: 3848 - protein, 11 aa, Homo sapiens
QSYDISLGGWV

SEQ ID NO: 3849 - protein, 10 aa, Homo sapiens
QQSYSMPPIT

SEQ ID NO: 3850 - protein, 12 aa, Homo sapiens
AAWDDSLNGSWV

SEQ ID NO: 3851 - protein, 11 aa, Homo sapiens
AAWDDSLSGLI

SEQ ID NO: 3852 - protein, 10 aa, Homo sapiens
CSYAGSSTWL

SEQ ID NO: 3853 - protein, 12 aa, Homo sapiens
QVWDSSSDHHVV

SEQ ID NO: 3854 - protein, 11 aa, Homo sapiens
VAWDDSRNGLV

SEQ ID NO: 3855 - protein, 11 aa, Homo sapiens
GTWDSSLSAYV

SEQ ID NO: 3856 - protein, 12 aa, Homo sapiens
QVWDSSSDHPGV

SEQ ID NO: 3857 - protein, 9 aa, Homo sapiens
QAWGSSRGV

SEQ ID NO: 3858 - protein, 12 aa, Homo sapiens
NSRDNSGNLNWV

SEQ ID NO: 3859 - protein, 9 aa, Homo sapiens
QQYDNLPYT

SEQ ID NO: 3860 - protein, 9 aa, Homo sapiens
QSADSSGSR

SEQ ID NO: 3861 - protein, 9 aa, Homo sapiens
QQYNNWPYT

SEQ ID NO: 3862 - protein, 10 aa, Homo sapiens
QQSYEIPPWT

SEQ ID NO: 3863 - protein, 11 aa, Homo sapiens
ATWDDSLNGPV

SEQ ID NO: 3864 - protein, 12 aa, Homo sapiens
QSYDSRLSGFVV

SEQ ID NO: 3865 - protein, 11 aa, Homo sapiens
QSADSSGTSVL

SEQ ID NO: 3866 - protein, 10 aa, Homo sapiens
CSYARSSTRV

SEQ ID NO: 3867 - protein, 9 aa, Homo sapiens
QSADSRGAV

SEQ ID NO: 3868 - protein, 11 aa, Homo sapiens
AVWDDSLHSYV

SEQ ID NO: 3869 - protein, 9 aa, Homo sapiens
QQSYSTPRT

SEQ ID NO: 3870 - protein, 9 aa, Homo sapiens
QQYDNLPLA

SEQ ID NO: 3871 - protein, 9 aa, Homo sapiens
QQSYTTLLT

SEQ ID NO: 3872 - protein, 11 aa, Homo sapiens
QSYDSSLSGWV

SEQ ID NO: 3873 - protein, 9 aa, Homo sapiens
QQYANLPFT

SEQ ID NO: 3874 - protein, 9 aa, Homo sapiens
QQYDNLPRT

SEQ ID NO: 3875 - protein, 11 aa, Homo sapiens
QSYDSSLSGYV

SEQ ID NO: 3876 - protein, 11 aa, Homo sapiens
CSYAVSTTYVI

SEQ ID NO: 3877 - protein, 10 aa, Homo sapiens
QQSYSNPSYT

SEQ ID NO: 3878 - protein, 11 aa, Homo sapiens
QQYGSSPPRYT

SEQ ID NO: 3879 - protein, 10 aa, Homo sapiens
QQSYSTLLYT

SEQ ID NO: 3880 - protein, 9 aa, Homo sapiens
MQALQTPFT

SEQ ID NO: 3881 - protein, 12 aa, Homo sapiens
QVWDSSSDRLYV

SEQ ID NO: 3882 - protein, 10 aa, Homo sapiens
QQSYSNPSYT

SEQ ID NO: 3883 - protein, 10 aa, Homo sapiens
CSYAGSSTWL

SEQ ID NO: 3884 - protein, 10 aa, Homo sapiens
QSYDSTSRVV

SEQ ID NO: 3885 - protein, 11 aa, Homo sapiens
QVWDSGSDHVV

SEQ ID NO: 3886 - protein, 9 aa, Homo sapiens
QQSYSTPQT

SEQ ID NO: 3887 - protein, 11 aa, Homo sapiens
ASWDDSLIGPV

SEQ ID NO: 3888 - protein, 10 aa, Homo sapiens
QQLNSYPGYT

SEQ ID NO: 3889 - protein, 9 aa, Homo sapiens
QSYDSNNQV

SEQ ID NO: 3890 - protein, 9 aa, Homo sapiens
QSYDSSDVV

SEQ ID NO: 3891 - protein, 12 aa, Homo sapiens
QVWDSSSDHHVV

SEQ ID NO: 3892 - protein, 11 aa, Homo sapiens
QSADSSGTYRV

SEQ ID NO: 3893 - protein, 9 aa, Homo sapiens
QQYYNWPLT

SEQ ID NO: 3894 - protein, 11 aa, Homo sapiens
QSADSSAAYVV

SEQ ID NO: 3895 - protein, 10 aa, Homo sapiens
YSTDSSGKGV

SEQ ID NO: 3896 - protein, 12 aa, Homo sapiens
QVWDSSSDPFYV

SEQ ID NO: 3897 - protein, 11 aa, Homo sapiens
QSYDGINRAWV

SEQ ID NO: 3898 - protein, 9 aa, Homo sapiens
QQYYSTPWT

SEQ ID NO: 3899 - protein, 9 aa, Homo sapiens
QQYNSYSYT

SEQ ID NO: 3900 - protein, 11 aa, Homo sapiens
QQYDDWPPEVT

SEQ ID NO: 3901 - protein, 11 aa, Homo sapiens
VAWDDSRNGLV

SEQ ID NO: 3902 - protein, 11 aa, Homo sapiens
QSFDIGRGGWI

SEQ ID NO: 3903 - protein, 9 aa, Homo sapiens
QQSYSTPPT

SEQ ID NO: 3904 - protein, 11 aa, Homo sapiens
QSYDSSLSGSV

SEQ ID NO: 3905 - protein, 8 aa, Homo sapiens
CSYAGSVL

SEQ ID NO: 3906 - protein, 9 aa, Homo sapiens
QQSFSTPRT

SEQ ID NO: 3907 - protein, 13 aa, Homo sapiens
QVWDSSSDHPEWV

SEQ ID NO: 3908 - protein, 9 aa, Homo sapiens
MQALQTPWT

SEQ ID NO: 3909 - protein, 11 aa, Homo sapiens
NSRDSSGNPRW

SEQ ID NO: 3910 - protein, 11 aa, Homo sapiens
QQYGSSPPRYT

SEQ ID NO: 3911 - protein, 11 aa, Homo sapiens
QSVDSSGTYRV

SEQ ID NO: 3912 - protein, 9 aa, Homo sapiens
QQYDNLPLA

SEQ ID NO: 3913 - protein, 9 aa, Homo sapiens
MQGTHWPYT

SEQ ID NO: 3914 - protein, 10 aa, Homo sapiens
CSYAGRYTWV

SEQ ID NO: 3915 - protein, 9 aa, Homo sapiens
QLLNSHPLT

SEQ ID NO: 3916 - protein, 9 aa, Homo sapiens
QSADSTGWV

SEQ ID NO: 3917 - protein, 9 aa, Homo sapiens
MQSIQLPYT

SEQ ID NO: 3918 - protein, 7 aa, Homo sapiens
MQSIQLA

SEQ ID NO: 3919 - protein, 10 aa, Homo sapiens
QHYGSSRGWT

SEQ ID NO: 3920 - protein, 9 aa, Homo sapiens
QQYYNWPLT

SEQ ID NO: 3921 - protein, 9 aa, Homo sapiens
QQYNSYPYT

SEQ ID NO: 3922 - protein, 10 aa, Homo sapiens
QQSYEIPPWT

SEQ ID NO: 3923 - protein, 9 aa, Homo sapiens
QQYANLPFT

SEQ ID NO: 3924 - protein, 10 aa, Homo sapiens
QHYGSSRGWT

SEQ ID NO: 3925 - protein, 13 aa, Homo sapiens
QSVDSSGTYPHVI

SEQ ID NO: 3926 - protein, 12 aa, Homo sapiens
QSYASSLSAHVV

SEQ ID NO: 3927 - protein, 8 aa, Homo sapiens
QQYYSSYT

SEQ ID NO: 3928 - protein, 11 aa, Homo sapiens
QQYGSSPPPFT

SEQ ID NO: 3929 - protein, 11 aa, Homo sapiens
SSYTSSSTPVV

SEQ ID NO: 3930 - protein, 9 aa, Homo sapiens
QKYNSAPPA

SEQ ID NO: 3931 - protein, 10 aa, Homo sapiens
QAWGSTTAKV

SEQ ID NO: 3932 - protein, 11 aa, Homo sapiens
QQRSNWPPRVT

SEQ ID NO: 3933 - protein, 12 aa, Homo sapiens
SSYTSSSTRHWV

SEQ ID NO: 3934 - protein, 9 aa, Homo sapiens
QQSYSTPYT

SEQ ID NO: 3935 - protein, 11 aa, Homo sapiens
SAYTTTSTSWV

SEQ ID NO: 3936 - protein, 10 aa, Homo sapiens
SSYVGNNNWV

SEQ ID NO: 3937 - protein, 9 aa, Homo sapiens
QQYDNPPLT

SEQ ID NO: 3938 - protein, 9 aa, Homo sapiens
LLSYSGVWV

SEQ ID NO: 3939 - protein, 10 aa, Homo sapiens [sequence omitted]

SEQ ID NO: 3940 - protein, 11 aa, Homo sapiens
QVWDSSSDHWV

SEQ ID NO: 3941 - protein, 10 aa, Homo sapiens
QQYNNWPPGT

SEQ ID NO: 3942 - protein, 9 aa, Homo sapiens
QAWDSSTAV

SEQ ID NO: 3943 - protein, 12 aa, Homo sapiens
QSADSSGTYSVV

SEQ ID NO: 3944 - protein, 9 aa, Homo sapiens
QQYNSYSIT

SEQ ID NO: 3945 - protein, 9 aa, Homo sapiens
QQLHSYPLT

SEQ ID NO: 3946 - protein, 10 aa, Homo sapiens
QQYGSSPLFT

SEQ ID NO: 3947 - protein, 10 aa, Homo sapiens
QQSYSTPPVT

SEQ ID NO: 3948 - protein, 10 aa, Homo sapiens
QQSYSTHMST

SEQ ID NO: 3949 - protein, 10 aa, Homo sapiens
QQRSNWPQVT

SEQ ID NO: 3950 - protein, 8 aa, Homo sapiens
QQYGSLYT

SEQ ID NO: 3951 - protein, 9 aa, Homo sapiens
QQYDNLPLT

SEQ ID NO: 3952 - protein, 9 aa, Homo sapiens
QQYGSSPGT

SEQ ID NO: 3953 - protein, 9 aa, Homo sapiens
QQYGSSLLT

SEQ ID NO: 3954 - protein, 10 aa, Homo sapiens
QQYGSSPRLT

SEQ ID NO: 3955 - protein, 10 aa, Homo sapiens [sequence omitted]

SEQ ID NO: 3956 - protein, 9 aa, Homo sapiens
QQYGSSPGT

SEQ ID NO: 3957 - protein, 11 aa, Homo sapiens
QQRSNWPPMYT

SEQ ID NO: 3958 - protein, 9 aa, Homo sapiens
MQGTHWPRT

SEQ ID NO: 3959 - protein, 9 aa, Homo sapiens
LQHNSYPPL

SEQ ID NO: 3960 - protein, 10 aa, Homo sapiens
QQRSNWPPYT

SEQ ID NO: 3961 - protein, 11 aa, Homo sapiens
QQRSNWPPSIT

SEQ ID NO: 3962 - protein, 9 aa, Homo sapiens
LQHNSYLWT

SEQ ID NO: 3963 - protein, 9 aa, Homo sapiens
QQYDNLPIT

SEQ ID NO: 3964 - protein, 10 aa, Homo sapiens
QQYGSSPGVT

SEQ ID NO: 3965 - protein, 9 aa, Homo sapiens
QQSYSTPQT

SEQ ID NO: 3966 - protein, 10 aa, Homo sapiens
SSYTSSSTWV

SEQ ID NO: 3967 - protein, 10 aa, Homo sapiens
QAWDSSTAVV

SEQ ID NO: 3968 - protein, 10 aa, Homo sapiens
QQYNYWPLIT

SEQ ID NO: 3969 - protein, 9 aa, Homo sapiens
QQSYSTPRT

SEQ ID NO: 3970 - protein, 9 aa, Homo sapiens
QVWASSSVV

SEQ ID NO: 3971 - protein, 9 aa, Homo sapiens
MQSIQLPPT

SEQ ID NO: 3972 - protein, 11 aa, Homo sapiens
QQRSNWPPRLT

SEQ ID NO: 3973 - protein, 7 aa, Homo sapiens
CSYAGSV

SEQ ID NO: 3974 - protein, 13 aa, Homo sapiens
SSYTSSSTLGLYV

SEQ ID NO: 3975 - protein, 11 aa, Homo sapiens
QSYDSSLSGSV

SEQ ID NO: 3976 - protein, 9 aa, Homo sapiens
LQHNSYPLT

SEQ ID NO: 3977 - protein, 10 aa, Homo sapiens
CSYAGSSTWV

SEQ ID NO: 3978 - protein, 10 aa, Homo sapiens
CSYAGSSTWV

SEQ ID NO: 3979 - protein, 10 aa, Homo sapiens
QQCYNWPPWT

SEQ ID NO: 3980 - protein, 9 aa, Homo sapiens
LQHNSYPLT

SEQ ID NO: 3981 - protein, 10 aa, Homo sapiens
QQSYTTFIYT

SEQ ID NO: 3982 - protein, 9 aa, Homo sapiens
QQYGSSPYT

SEQ ID NO: 3983 - protein, 10 aa, Homo sapiens
QQYDNLLSLT

SEQ ID NO: 3984 - protein, 10 aa, Homo sapiens
QQYYSTPPLT

SEQ ID NO: 3985 - protein, 8 aa, Homo sapiens
QQSYSTLT

SEQ ID NO: 3986 - protein, 11 aa, Homo sapiens
QSADSSGTYRV

SEQ ID NO: 3987 - protein, 11 aa, Homo sapiens
QVWDSSSDHYV

SEQ ID NO: 3988 - protein, 13 aa, Homo sapiens
AAWDDSLNGPHWV

SEQ ID NO: 3989 - protein, 9 aa, Homo sapiens
QQYYSTPLT

SEQ ID NO: 3990 - protein, 9 aa, Homo sapiens
QQYGSSPFT

SEQ ID NO: 3991 - protein, 9 aa, Homo sapiens
QQSYSTPLT

SEQ ID NO: 3992 - protein, 8 aa, Homo sapiens
QQSYSTLT

SEQ ID NO: 3993 - protein, 9 aa, Homo sapiens
QQYYSTPIT

SEQ ID NO: 3994 - protein, 9 aa, Homo sapiens
QQYYSTPYT

SEQ ID NO: 3995 - protein, 9 aa, Homo sapiens
QQANGFPPL

SEQ ID NO: 3996 - protein, 9 aa, Homo sapiens
QQSYSTPYT

SEQ ID NO: 3997 - protein, 10 aa, Homo sapiens
QQRSNWPPVT

SEQ ID NO: 3998 - protein, 10 aa, Homo sapiens
SSYTSSSTYV

SEQ ID NO: 3999 - protein, 9 aa, Homo sapiens
QQYDNLPLT

SEQ ID NO: 4000 - protein, 11 aa, Homo sapiens
CSYAGGSTSYV

SEQ ID NO: 4001 - protein, 10 aa, Homo sapiens
SSYAGNNDFV

SEQ ID NO: 4002 - protein, 10 aa, Homo sapiens
CSYAGHSTWV

SEQ ID NO: 4003 - protein, 10 aa, Homo sapiens
CSYAGTSTFV

SEQ ID NO: 4004 - protein, 10 aa, Homo sapiens
CSYAGSSSWV

SEQ ID NO: 4005 - protein, 10 aa, Homo sapiens
SSYTSSSTYV

SEQ ID NO: 4006 - protein, 10 aa, Homo sapiens
QQYYGSSPWT

SEQ ID NO: 4007 - protein, 8 aa, Homo sapiens
QQSYSTHA

SEQ ID NO: 4008 - protein, 11 aa, Homo sapiens
AAWDDSLNGPV

SEQ ID NO: 4009 - protein, 9 aa, Homo sapiens
QQYAGSPWT

SEQ ID NO: 4010 - protein, 11 aa, Homo sapiens
QQRSNWPPIFT

SEQ ID NO: 4011 - protein, 9 aa, Homo sapiens
MQGTHWPVT

SEQ ID NO: 4012 - protein, 9 aa, Homo sapiens
QQSYSNPLT

SEQ ID NO: 4013 - protein, 10 aa, Homo sapiens
CSYAGSYTWV

SEQ ID NO: 4014 - protein, 9 aa, Homo sapiens
QQYGSSRGT

SEQ ID NO: 4015 - protein, 10 aa, Homo sapiens
CSYAGSSTYV

SEQ ID NO: 4016 - protein, 12 aa, Homo sapiens
GTWDSSLSAGPV

SEQ ID NO: 4017 - protein, 11 aa, Homo sapiens
QQYGSSPPKYT

SEQ ID NO: 4018 - protein, 11 aa, Homo sapiens
QQYNNWPPSLT

SEQ ID NO: 4019 - protein, 9 aa, Homo sapiens
QQRSNWPLT

SEQ ID NO: 4020 - protein, 9 aa, Homo sapiens
QTWGTGIRV

SEQ ID NO: 4021 - protein, 11 aa, Homo sapiens
QSADSSGTYVV

SEQ ID NO: 4022 - protein, 12 aa, Homo sapiens
GTWDSSLSASYV

SEQ ID NO: 4023 - protein, 9 aa, Homo sapiens
QQYNNWPYT

SEQ ID NO: 4024 - protein, 9 aa, Homo sapiens
LQHNSYPFT

SEQ ID NO: 4025 - protein, 11 aa, Homo sapiens
SSYTSSSTPYV

SEQ ID NO: 4026 - protein, 9 aa, Homo sapiens
QQSYSNPLT

SEQ ID NO: 4027 - protein, 9 aa, Homo sapiens
QQYGSSPQT

SEQ ID NO: 4028 - protein, 12 aa, Homo sapiens
GTWDSSLSASYV

SEQ ID NO: 4029 - protein, 11 aa, Homo sapiens
GTWDSSLSAVV

SEQ ID NO: 4030 - protein, 12 aa, Homo sapiens
QSYDSSLSGPVV

SEQ ID NO: 4031 - protein, 11 aa, Homo sapiens
QVWDSSSDHVV

SEQ ID NO: 4032 - protein, 11 aa, Homo sapiens
AAWDDSLNGPV

SEQ ID NO: 4033 - protein, 11 aa, Homo sapiens
QSADSSGTYMI

SEQ ID NO: 4034 - protein, 8 aa, Homo sapiens
QQYDNLPR

SEQ ID NO: 4035 - protein, 10 aa, Homo sapiens
QQRSNWPPIT

SEQ ID NO: 4036 - protein, 10 aa, Homo sapiens
QQYDNLPSWT

SEQ ID NO: 4037 - protein, 10 aa, Homo sapiens
QQLNSYPPGT

SEQ ID NO: 4038 - protein, 11 aa, Homo sapiens
QQSYSTPRQWT

SEQ ID NO: 4039 - protein, 11 aa, Homo sapiens
QSYDSSLSGSV

SEQ ID NO: 4040 - protein, 5 aa, Homo sapiens
QQLYT

SEQ ID NO: 4041 - protein, 9 aa, Homo sapiens
MQGTHWPVT

SEQ ID NO: 4042 - protein, 7 aa, Homo sapiens
QQYNSYT

SEQ ID NO: 4043 - protein, 9 aa, Homo sapiens
LQHNSYPLT

SEQ ID NO: 4044 - protein, 9 aa, Homo sapiens
QQYNNWPLT

SEQ ID NO: 4045 - protein, 9 aa, Homo sapiens
QQTYITAFT

SEQ ID NO: 4046 - protein, 9 aa, Homo sapiens
QSYDSSNWV

SEQ ID NO: 4047 - protein, 11 aa, Homo sapiens
QSADSSGTYVV

SEQ ID NO: 4048 - protein, 11 aa, Homo sapiens
QSYDSSLTLYV

SEQ ID NO: 4049 - protein, 9 aa, Homo sapiens
MQGTHWPVT

SEQ ID NO: 4050 - protein, 9 aa, Homo sapiens
LQHNSYPLT

SEQ ID NO: 4051 - protein, 9 aa, Homo sapiens
MQGTHWPPT

SEQ ID NO: 4052 - protein, 9 aa, Homo sapiens
QQYYITPYT

SEQ ID NO: 4053 - protein, 11 aa, Homo sapiens
YSTDSSGNLYV

SEQ ID NO: 4054 - protein, 7 aa, Homo sapiens
QQYNSYT

SEQ ID NO: 4055 - protein, 9 aa, Homo sapiens
QQYGSSPGT

SEQ ID NO: 4056 - protein, 10 aa, Homo sapiens
SSYTSISTWV

SEQ ID NO: 4057 - protein, 10 aa, Homo sapiens
QQSYSTLALT

SEQ ID NO: 4058 - protein, 10 aa, Homo sapiens
SSYAGSNNLV

SEQ ID NO: 4059 - protein, 9 aa, Homo sapiens
QQYGSSPGT

SEQ ID NO: 4060 - protein, 9 aa, Homo sapiens
QQYDNLPLT

SEQ ID NO: 4061 - protein, 9 aa, Homo sapiens
QQYDNLPLT

SEQ ID NO: 4062 - protein, 9 aa, Homo sapiens
MQRIEFPLT

SEQ ID NO: 4063 - protein, 11 aa, Homo sapiens
QQRSNWPPTWT

SEQ ID NO: 4064 - protein, 9 aa, Homo sapiens
QQYGSSPWT

SEQ ID NO: 4065 - protein, 9 aa, Homo sapiens
QHYHSFPLT

SEQ ID NO: 4066 - protein, 9 aa, Homo sapiens
QQYGSSPRT

SEQ ID NO: 4067 - protein, 9 aa, Homo sapiens
QQYGSSPRT

SEQ ID NO: 4068 - protein, 9 aa, Homo sapiens
QQYGRSPWT

SEQ ID NO: 4069 - protein, 9 aa, Homo sapiens
QQSYSNPLT

SEQ ID NO: 4070 - protein, 12 aa, Homo sapiens
QSYDSSLSVLYV

SEQ ID NO: 4071 - protein, 10 aa, Homo sapiens
QQYNSWPPLT

SEQ ID NO: 4072 - protein, 8 aa, Homo sapiens
QRRGDGYN

SEQ ID NO: 4073 - protein, 9 aa, Homo sapiens
MQGTEWPRT

SEQ ID NO: 4074 - protein, 9 aa, Homo sapiens
MQGTEWPRT

SEQ ID NO: 4075 - protein, 9 aa, Homo sapiens
QQSYSTPYT

SEQ ID NO: 4076 - protein, 10 aa, Homo sapiens
CSYAGSGTWI

SEQ ID NO: 4077 - protein, 9 aa, Homo sapiens
HQYGSSPWT

SEQ ID NO: 4078 - protein, 8 aa, Homo sapiens
QRRGDGYN

SEQ ID NO: 4079 - protein, 9 aa, Homo sapiens
MQATDWPRT

SEQ ID NO: 4080 - protein, 9 aa, Homo sapiens
MQTTDWPRT

SEQ ID NO: 4081 - protein, 9 aa, Homo sapiens
MQGTEWPRT

SEQ ID NO: 4082 - protein, 9 aa, Homo sapiens
QQFEDLPIT

SEQ ID NO: 4083 - protein, 9 aa, Homo sapiens
QQYYSTPYT

SEQ ID NO: 4084 - protein, 10 aa, Homo sapiens
QQYGTSPVYT

SEQ ID NO: 4085 - protein, 11 aa, Homo sapiens
GTWDFSLSAGV

SEQ ID NO: 4086 - protein, 9 aa, Homo sapiens
MQGTEWPRT

SEQ ID NO: 4087 - protein, 8 aa, Homo sapiens
QQYKSPLS

SEQ ID NO: 4088 - protein, 10 aa, Homo sapiens
QQRSDWHPIT

SEQ ID NO: 4089 - protein, 8 aa, Homo sapiens
QQSYSTPG

SEQ ID NO: 4090 - protein, 11 aa, Homo sapiens
QQRAKWPPRVT

SEQ ID NO: 4091 - protein, 11 aa, Homo sapiens
QQRAKWPPRVI

SEQ ID NO: 4092 - protein, 11 aa, Homo sapiens
YSTDSTANYKV

SEQ ID NO: 4093 - protein, 9 aa, Homo sapiens
MQGTEWPRT

SEQ ID NO: 4094 - protein, 12 aa, Homo sapiens
CSYAGSSAVVVV

SEQ ID NO: 4095 - protein, 9 aa, Homo sapiens
QQYYSTPYT

SEQ ID NO: 4096 - protein, 10 aa, Homo sapiens
LQRSDWHPIT

SEQ ID NO: 4097 - protein, 11 aa, Homo sapiens
QQRSNWPPRLT

SEQ ID NO: 4098 - protein, 8 aa, Homo sapiens
LQYSLATT

SEQ ID NO: 4099 - protein, 10 aa, Homo sapiens
ETWDSNLKGV

SEQ ID NO: 4100 - protein, 10 aa, Homo sapiens
EAWDNNNLGV

SEQ ID NO: 4101 - protein, 9 aa, Homo sapiens
LQHNSYPLT

SEQ ID NO: 4102 - protein, 10 aa, Homo sapiens
MQALQTPGVT

SEQ ID NO: 4103 - protein, 11 aa, Homo sapiens
ATWDDSLNGVV

SEQ ID NO: 4104 - protein, 9 aa, Homo sapiens
MQGTDWPRS

SEQ ID NO: 4105 - protein, 9 aa, Homo sapiens
LHTYTTPRT

SEQ ID NO: 4106 - protein, 10 aa, Homo sapiens
QQYNYWPPLT

SEQ ID NO: 4107 - protein, 9 aa, Homo sapiens
QQSYRFPIT

SEQ ID NO: 4108 - protein, 10 aa, Homo sapiens
QQRTNWPGAT

SEQ ID NO: 4109 - protein, 9 aa, Homo sapiens
HTWGTDIQV

SEQ ID NO: 4110 - protein, 9 aa, Homo sapiens
QSYDSSSQV

SEQ ID NO: 4111 - protein, 10 aa, Homo sapiens
QQYNYWPPLT

SEQ ID NO: 4112 - protein, 9 aa, Homo sapiens
MQGTEWPRT

SEQ ID NO: 4113 - protein, 8 aa, Homo sapiens
QQYNSLYT

SEQ ID NO: 4114 - protein, 10 aa, Homo sapiens
QQYHHWPPYT

SEQ ID NO: 4115 - protein, 10 aa, Homo sapiens
QQYCSTPPYT

SEQ ID NO: 4116 - protein, 9 aa, Homo sapiens
MQGTEWPRT

SEQ ID NO: 4117 - protein, 9 aa, Homo sapiens
MQGTDWPRS

SEQ ID NO: 4118 - protein, 10 aa, Homo sapiens
QQSYSTPLIT

SEQ ID NO: 4119 - protein, 9 aa, Homo sapiens
MQGTEWPRT

SEQ ID NO: 4120 - protein, 9 aa, Homo sapiens
MQGTDWPRT

SEQ ID NO: 4121 - protein, 8 aa, Homo sapiens
QQRFSWYN

SEQ ID NO: 4122 - protein, 11 aa, Homo sapiens
CSYGGRSTSVV

SEQ ID NO: 4123 - protein, 8 aa, Homo sapiens
QQRFSWYN

SEQ ID NO: 4124 - protein, 10 aa, Homo sapiens
SSYTSGGTLV

SEQ ID NO: 4125 - protein, 9 aa, Homo sapiens
MQATEWPRT

SEQ ID NO: 4126 - protein, 9 aa, Homo sapiens
MQGTEWPRT

SEQ ID NO: 4127 - protein, 9 aa, Homo sapiens
MQGTEWPRT

SEQ ID NO: 4128 - protein, 9 aa, Homo sapiens
MQGTDWPRT

SEQ ID NO: 4129 - protein, 9 aa, Homo sapiens
MQGTEWPRT

SEQ ID NO: 4130 - protein, 9 aa, Homo sapiens
MQATEWPRT

SEQ ID NO: 4131 - protein, 11 aa, Homo sapiens
QSADSNDSSPV

SEQ ID NO: 4132 - protein, 9 aa, Homo sapiens
HQRSNWPYT

SEQ ID NO: 4133 - protein, 9 aa, Homo sapiens
QQSYSIPWT

SEQ ID NO: 4134 - protein, 10 aa, Homo sapiens
QHSYSSPPLT

SEQ ID NO: 4135 - protein, 9 aa, Homo sapiens
MQGTDWPRT

SEQ ID NO: 4136 - protein, 9 aa, Homo sapiens
MQTTDWPRT

SEQ ID NO: 4137 - protein, 9 aa, Homo sapiens
MQGTEWPRT

SEQ ID NO: 4138 - protein, 8 aa, Homo sapiens
HQYSGSAT

SEQ ID NO: 4139 - protein, 11 aa, Homo sapiens
ATWDDILNGPV

SEQ ID NO: 4140 - protein, 9 aa, Homo sapiens
QKYNRAPWT

SEQ ID NO: 4141 - protein, 11 aa, Homo sapiens
SSYISDIKLVV

SEQ ID NO: 4142 - protein, 8 aa, Homo sapiens
CSYAGTYI

SEQ ID NO: 4143 - protein, 10 aa, Homo sapiens
CSYRSDNTYI

SEQ ID NO: 4144 - protein, 9 aa, Homo sapiens
MQGTEWPRT

SEQ ID NO: 4145 - protein, 13 aa, Homo sapiens
AAWDDSLNTFRYV

SEQ ID NO: 4146 - protein, 9 aa, Homo sapiens
QQSYNTFFT

SEQ ID NO: 4147 - protein, 9 aa, Homo sapiens
QHYDSYPTA

SEQ ID NO: 4148 - protein, 9 aa, Homo sapiens
MQGTEWLGT

SEQ ID NO: 4149 - protein, 9 aa, Homo sapiens
MQGTEWPRT

SEQ ID NO: 4150 - protein, 9 aa, Homo sapiens
MQTTDWPRT

SEQ ID NO: 4151 - protein, 9 aa, Homo sapiens
QQSYSTPPT

SEQ ID NO: 4152 - protein, 10 aa, Homo sapiens
HQYNKWPPIT

SEQ ID NO: 4153 - protein, 9 aa, Homo sapiens
KQYNSYPYT

SEQ ID NO: 4154 - protein, 9 aa, Homo sapiens
QQSYSDSWT

SEQ ID NO: 4155 - protein, 9 aa, Homo sapiens
MQGTEWPRT

SEQ ID NO: 4156 - protein, 9 aa, Homo sapiens
MQGTDWPRT

SEQ ID NO: 4157 - protein, 9 aa, Homo sapiens
QQYYTTPYT

SEQ ID NO: 4158 - protein, 12 aa, Homo sapiens
QQTYSTPPEGPT

SEQ ID NO: 4159 - protein, 11 aa, Homo sapiens
CSYAGASPFVV

SEQ ID NO: 4160 - protein, 8 aa, Homo sapiens
QQYGSSYT

SEQ ID NO: 4161 - protein, 9 aa, Homo sapiens
MQATEWPRT

SEQ ID NO: 4162 - protein, 9 aa, Homo sapiens
MQTTDWPRT

SEQ ID NO: 4163 - protein, 9 aa, Homo sapiens
MQGTDWPRT

SEQ ID NO: 4164 - protein, 9 aa, Homo sapiens
MQGTEWPRT

SEQ ID NO: 4165 - protein, 10 aa, Homo sapiens
CSYAGDDTVV

SEQ ID NO: 4166 - protein, 9 aa, Homo sapiens
HQYGGSPTT

SEQ ID NO: 4167 - protein, 9 aa, Homo sapiens
MQGTDWPRT

SEQ ID NO: 4168 - protein, 8 aa, Homo sapiens
QQRTSTLT

SEQ ID NO: 4169 - protein, 9 aa, Homo sapiens
MQGTEWPRT

SEQ ID NO: 4170 - protein, 11 aa, Homo sapiens
ETWDSSLSVVV

SEQ ID NO: 4171 - protein, 11 aa, Homo sapiens
GTWDSRLSAVV

SEQ ID NO: 4172 - protein, 9 aa, Homo sapiens
QQRSNWPQN

SEQ ID NO: 4173 - protein, 9 aa, Homo sapiens
QQYDSYPVT

SEQ ID NO: 4174 - protein, 8 aa, Homo sapiens
QQYYTMWT

SEQ ID NO: 4175 - protein, 13 aa, Homo sapiens
GTWDSSLSVDNYV

SEQ ID NO: 4176 - protein, 9 aa, Homo sapiens
MQGTDWPRT

SEQ ID NO: 4177 - protein, 9 aa, Homo sapiens
MQGTEWPRT

SEQ ID NO: 4178 - protein, 9 aa, Homo sapiens
QQSYSTPLT

SEQ ID NO: 4179 - protein, 9 aa, Homo sapiens
QQRSNWPQN

SEQ ID NO: 4180 - protein, 10 aa, Homo sapiens
QSYDSSLSAS

SEQ ID NO: 4181 - protein, 11 aa, Homo sapiens
QSYDSSLSGVL

SEQ ID NO: 4182 - protein, 9 aa, Homo sapiens
MQGTEWPRT

SEQ ID NO: 4183 - protein, 10 aa, Homo sapiens
QQYNTWPPLT

SEQ ID NO: 4184 - protein, 9 aa, Homo sapiens
MQGTHWPRS

SEQ ID NO: 4185 - protein, 10 aa, Homo sapiens
QQYGSAPLYT

SEQ ID NO: 4186 - protein, 9 aa, Homo sapiens
QQYGNSPRT

SEQ ID NO: 4187 - protein, 11 aa, Homo sapiens
ETWDTSLSVVV

SEQ ID NO: 4188 - protein, 9 aa, Homo sapiens
MQGTDWPRT

SEQ ID NO: 4189 - protein, 8 aa, Homo sapiens
LQYSDATT

SEQ ID NO: 4190 - protein, 9 aa, Homo sapiens
QQSYTTPIT

SEQ ID NO: 4191 - protein, 9 aa, Homo sapiens
MQATEWPRT

SEQ ID NO: 4192 - protein, 11 aa, Homo sapiens
QQRRNWPPMYT

SEQ ID NO: 4193 - protein, 9 aa, Homo sapiens
MQTTDWPRT

SEQ ID NO: 4194 - protein, 9 aa, Homo sapiens
MQTTDWPRT

SEQ ID NO: 4195 - protein, 10 aa, Homo sapiens
QSYDSGNLVV

SEQ ID NO: 4196 - protein, 9 aa, Homo sapiens
MQGTEWPRT

SEQ ID NO: 4197 - protein, 9 aa, Homo sapiens
MQGTDWPRT

SEQ ID NO: 4198 - protein, 10 aa, Homo sapiens
QQYGTSPVYT

SEQ ID NO: 4199 - protein, 9 aa, Homo sapiens
MQGTDWPRT

SEQ ID NO: 4200 - protein, 11 aa, Homo sapiens
QQRRNWPPMYT

SEQ ID NO: 4201 - protein, 12 aa, Homo sapiens
QSYDSSLSVLYV

SEQ ID NO: 4202 - protein, 9 aa, Homo sapiens
QHRTNWPYT

SEQ ID NO: 4203 - protein, 10 aa, Homo sapiens
FLSYRGAPPV

SEQ ID NO: 4204 - protein, 9 aa, Homo sapiens
QKHDRDPWT

SEQ ID NO: 4205 - protein, 9 aa, Homo sapiens
MQGTEWPRT

SEQ ID NO: 4206 - protein, 9 aa, Homo sapiens
QQAESFPFT

SEQ ID NO: 4207 - protein, 9 aa, Homo sapiens
MQATDWPRT

SEQ ID NO: 4208 - protein, 8 aa, Homo sapiens
QQRGNGYT

SEQ ID NO: 4209 - protein, 9 aa, Homo sapiens
MQATEWPRT

SEQ ID NO: 4210 - protein, 9 aa, Homo sapiens
MQGTDWPRT

SEQ ID NO: 4211 - protein, 9 aa, Homo sapiens
MQATDWPRT

SEQ ID NO: 4212 - protein, 9 aa, Homo sapiens
QQSYSVPLT

SEQ ID NO: 4213 - protein, 9 aa, Homo sapiens
MQATDWPRT

SEQ ID NO: 4214 - protein, 9 aa, Homo sapiens
STYTSTSTI

SEQ ID NO: 4215 - protein, 9 aa, Homo sapiens
MQGTDWPRT

SEQ ID NO: 4216 - protein, 9 aa, Homo sapiens
MQATDWPRT

SEQ ID NO: 4217 - protein, 9 aa, Homo sapiens
QQTYITPGT

SEQ ID NO: 4218 - protein, 9 aa, Homo sapiens
QQYYLTPWT

SEQ ID NO: 4219 - protein, 10 aa, Homo sapiens
CSYAVSGTVL

SEQ ID NO: 4220 - protein, 8 aa, Homo sapiens
LQYSLATT

SEQ ID NO: 4221 - protein, 8 aa, Homo sapiens
QQRSDGYN

SEQ ID NO: 4222 - protein, 10 aa, Homo sapiens
QQTYITPTWT

SEQ ID NO: 4223 - protein, 9 aa, Homo sapiens
QQSYSTPYN

SEQ ID NO: 4224 - protein, 8 aa, Homo sapiens
QQYNSQYT

SEQ ID NO: 4225 - protein, 10 aa, Homo sapiens
CSSPGTITWV

SEQ ID NO: 4226 - protein, 11 aa, Homo sapiens
ATWDDILNGPV

SEQ ID NO: 4227 - protein, 9 aa, Homo sapiens
MQATHWPRA

SEQ ID NO: 4228 - protein, 9 aa, Homo sapiens
HQYGSSPWT

SEQ ID NO: 4229 - protein, 11 aa, Homo sapiens
QHRSNWPPRYT

SEQ ID NO: 4230 - protein, 11 aa, Homo sapiens
YSTDSTANYKV

SEQ ID NO: 4231 - protein, 11 aa, Homo sapiens
YSTDSTANYKV

SEQ ID NO: 4232 - protein, 11 aa, Homo sapiens
YSTDSTANYKV

SEQ ID NO: 4233 - protein, 9 aa, Homo sapiens
MIWHDNAVV

SEQ ID NO: 4234 - protein, 10 aa, Homo sapiens
HQYNTWPPLT

SEQ ID NO: 4235 - protein, 9 aa, Homo sapiens
MQATHWPRA

SEQ ID NO: 4236 - protein, 9 aa, Homo sapiens
MQSIQVPIT

SEQ ID NO: 4237 - protein, 9 aa, Homo sapiens
QQYNLWPYT

SEQ ID NO: 4238 - protein, 9 aa, Homo sapiens
KQYNSYPYT

SEQ ID NO: 4239 - protein, 11 aa, Homo sapiens
ETWDDSLSAVV

SEQ ID NO: 4240 - protein, 9 aa, Homo sapiens
MQSIQTPIT

SEQ ID NO: 4241 - protein, 9 aa, Homo sapiens
QQYYSTPPT

SEQ ID NO: 4242 - protein, 9 aa, Homo sapiens
MQATEWPRT

SEQ ID NO: 4243 - protein, 10 aa, Homo sapiens
QQYYTTPLFT

SEQ ID NO: 4244 - protein, 9 aa, Homo sapiens
MQGTDWPRT

SEQ ID NO: 4245 - protein, 9 aa, Homo sapiens
MQGTEWPRT

SEQ ID NO: 4246 - protein, 9 aa, Homo sapiens
MQGTEWPRT

SEQ ID NO: 4247 - protein, 9 aa, Homo sapiens
MQGTDWPRT

SEQ ID NO: 4248 - protein, 11 aa, Homo sapiens
SSYTSSSTLYV

SEQ ID NO: 4249 - protein, 8 aa, Homo sapiens
QQYNSGWT

SEQ ID NO: 4250 - protein, 9 aa, Homo sapiens
MQGTDWPRT

SEQ ID NO: 4251 - protein, 8 aa, Homo sapiens
LQLHNYSS

SEQ ID NO: 4252 - protein, 8 aa, Homo sapiens
QQRSDGYN

SEQ ID NO: 4253 - protein, 9 aa, Homo sapiens
SSYTSTNTV

SEQ ID NO: 4254 - protein, 9 aa, Homo sapiens
MQGTDWPRT

SEQ ID NO: 4255 - protein, 8 aa, Homo sapiens
CSSPGTIT

SEQ ID NO: 4256 - protein, 9 aa, Homo sapiens
QQCYSYPPT

SEQ ID NO: 4257 - protein, 9 aa, Homo sapiens
QQYYSTPYT

SEQ ID NO: 4258 - protein, 11 aa, Homo sapiens
CSYTRTNTPVL

SEQ ID NO: 4259 - protein, 10 aa, Homo sapiens
QQYYSWPPLT

SEQ ID NO: 4260 - protein, 9 aa, Homo sapiens
MQGTDWPRT

SEQ ID NO: 4261 - protein, 9 aa, Homo sapiens
MQSTDWPRT

SEQ ID NO: 4262 - protein, 9 aa, Homo sapiens
MQGTEWPRT

SEQ ID NO: 4263 - protein, 10 aa, Homo sapiens
QQYNNWPSLT

SEQ ID NO: 4264 - protein, 9 aa, Homo sapiens
MQATEWPRT

SEQ ID NO: 4265 - protein, 8 aa, Homo sapiens
QQRSDGYN

SEQ ID NO: 4266 - protein, 11 aa, Homo sapiens
YSTDSTANYKV

SEQ ID NO: 4267 - protein, 9 aa, Mus musculus
QQFYNYPRT

SEQ ID NO: 4268 - protein, 7 aa, Mus musculus
QQDYSSP

SEQ ID NO: 4269 - protein, 7 aa, Mus musculus
QQDYSSP

SEQ ID NO: 4270 - protein, 11 aa, Mus musculus
MQHLENPLGVR

SEQ ID NO: 4271 - protein, 7 aa, Mus musculus
LQYHRSP

SEQ ID NO: 4272 - protein, 9 aa, Homo sapiens
QQSYTTPLT

SEQ ID NO: 4273 - protein, 9 aa, Homo sapiens
HQTYTSPYT

SEQ ID NO: 4274 - protein, 10 aa, Homo sapiens
QQYGVSPEII

SEQ ID NO: 4275 - protein, 12 aa, Homo sapiens
QVWDSSSHHHVV

SEQ ID NO: 4276 - protein, 9 aa, Homo sapiens
QQANSFPLT

SEQ ID NO: 4277 - protein, 9 aa, Homo sapiens
QQSYSTPYT

SEQ ID NO: 4278 - protein, 9 aa, Homo sapiens
QQYGSSPLT

SEQ ID NO: 4279 - protein, 9 aa, Homo sapiens
QQFGSSPLT

SEQ ID NO: 4280 - protein, 9 aa, Homo sapiens
LLSYTGARV

SEQ ID NO: 4281 - protein, 9 aa, Homo sapiens
QQANSFPGT

SEQ ID NO: 4282 - protein, 9 aa, Homo sapiens
QQANSFPGT

SEQ ID NO: 4283 - protein, 9 aa, Homo sapiens
QQSYSTLYS

SEQ ID NO: 4284 - protein, 9 aa, Homo sapiens
LQHNTYPFT

SEQ ID NO: 4285 - protein, 9 aa, Homo sapiens
HQYGSSPWT

SEQ ID NO: 4286 - protein, 9 aa, Homo sapiens
QQGNSFPFT

SEQ ID NO: 4287 - protein, 9 aa, Homo sapiens
LQHNTYPFT

SEQ ID NO: 4288 - protein, 9 aa, Homo sapiens
QQGNSFPFT

SEQ ID NO: 4289 - protein, 9 aa, Homo sapiens
LQHNTYPFT

SEQ ID NO: 4290 - protein, 9 aa, Homo sapiens
QHFGTSSVT

SEQ ID NO: 4291 - protein, 9 aa, Homo sapiens
QQYGSSPWT

SEQ ID NO: 4292 - protein, 10 aa, Homo sapiens
SSYAGSNNLV

SEQ ID NO: 4293 - protein, 9 aa, Homo sapiens
MQGTHWPPT

SEQ ID NO: 4294 - protein, 9 aa, Homo sapiens
QQSYSTPPT

SEQ ID NO: 4295 - protein, 9 aa, Homo sapiens
QQYDTYSWT

SEQ ID NO: 4296 - protein, 10 aa, Homo sapiens
QQSYVSPTYT

SEQ ID NO: 4297 - protein, 11 aa, Homo sapiens
QQRSNWPPGCS

SEQ ID NO: 4298 - protein, 8 aa, Homo sapiens
QQHDTSLT

SEQ ID NO: 4299 - protein, 10 aa, Homo sapiens
CSYAGSDTVI

SEQ ID NO: 4300 - protein, 9 aa, Homo sapiens
QSADSSGTV

1. A method comprising:
(a) administering a first composition to a subject, wherein said first composition comprises polycationic structures, and wherein said first composition is free, or essentially free, of nucleic acid molecules; and
(b) administering a second composition to said subject after administering said first composition, wherein said second composition comprises a plurality of one or more non-viral expression vectors that encode at least one anti-SARS-CoV-2 antibody or antigen-binding portion thereof, and/or recombinant ACE2, and
wherein, as a result of said administering said first and second compositions, said at least one anti-SARS-CoV-2 antibody, or antigen-binding portion thereof, and/or said recombinant ACE2, is expressed in said subject.

2. The method of claim 1, wherein:
a) said subject is infected with the SARS-CoV-2 virus, and wherein said at least one anti-SARS-CoV-2 antibody, or antigen-binding portion thereof, or recombinant ACE2 is expressed in said subject at an expression level sufficient to reduce: i) the SARS-CoV-2 viral load in said subject, and/or ii) at least one symptom in said subject caused by said SARS-CoV-2 infection; or
b) said subject is not infected with the SARS-CoV-2 virus, and wherein said at least one anti-SARS-CoV-2 antibody, or antigen-binding portion thereof, or recombinant ACE2 is expressed in said subject at an expression level sufficient to prevent said subject from being infected by the SARS-CoV-2 virus.

3. The method of claim 2, wherein said expression level is maintained in said subject for at least two weeks, at least one month, or at least one year without: i) any further, or only one, two, or three further repeat, of steps a) and b), and ii) any further administration of vectors encoding: said at least one anti-SARS-CoV-2 antibody or antigen-binding portion thereof, or said ACE2.

4. (canceled)

5. (canceled)

6. The method of claim 1, wherein said at least one anti-SARS-CoV-2 antibody, or antigen-binding portion thereof, is expressed in said subject at a level of: i) between 500 ng/ml and 50 ug/ml, or 10-20 ug/ml, for at least 25 days, or ii) at least 250 ng/ml for at least 25 days.

7. The method of claim 1, wherein said polycationic structures comprise cationic lipids.

8. The method of claim 7, wherein said first composition comprises a plurality of liposomes, wherein at least some of said liposomes comprise said cationic lipids.

9. The method of claim 8, wherein at least some of said liposomes comprise neutral lipids.

10. The method of claim 9, wherein the ratio of said cationic lipids to said neutral lipids in said liposomes is 95:05-80:20 or about 1:1.

11. The method of claim 10, wherein said cationic and neutral lipids are selected from the group consisting of: distearoyl phosphatidyl choline (DSPC); hydrogenated or non-hydrogenated soya phosphatidylcholine (HSPC); distearoylphosphatidylethanolamine (DSPE); egg phosphatidylcholine (EPC); 1,2-Distearoyl-sn-glycero-3-phospho-rac-glycerol (DSPG); dimyristoyl phosphatidylcholine (DMPC); 1,2-Dimyristoyl-sn-glycero-3-phosphoglycerol (DMPG); 1,2-Dipalmitoyl-sn-glycero-3-phosphate (DPPA); trimethylammonium propane lipids; DOTIM (1-[2-9(2)-octadecenoylloxy)ethyl]-2-(8(2)-heptadecenyl)-3-(2-hydroxyethyl) midizolinium chloride) lipids; and mixtures of two or more thereof.

12. (canceled)

13. (canceled)

14. The method of claim 1, wherein: A) said antigen-binding portion thereof is selected from the group consisting of: a Fab′, F(ab)2, Fab, and a minibody, or B) wherein said at least one anti-SARS-CoV-2 antibody, or antigen-binding portion thereof, is bi-specific for different SARS-CoV-2 antigens.

15. (canceled)

16. The method of claim 1, wherein said anti-SARS-CoV-2 antibody, or antigen-binding portion thereof, comprises one, two, three, four, five, six, seven, eight, nine, ten, eleven, twelve, or more antibodies selected from: REGN10933, REGN10987; VIR-7831; LY-CoV1404; LY3853113; Zost 2355K; CV07-209K; C121L; Zost 2504L; CV38-183L; COVA215K; RBD215; CV07-250L; C144L; COVA118L; C135K; and B38.

17. (canceled)

18. The method of claim 1, wherein said at least one anti-SARS-CoV-2 antibody, or antigen-binding portion thereof, comprises at least two, or at least four, or at least eight, or at least 11 anti-SARS-CoV-2 antibodies, or antigen-binding portions thereof, which are expressed in said subject at an expression level sufficient to reduce: i) the SARS-CoV-2 viral load in said subject, or ii) at least one symptom in said subject caused by said SARS-CoV-2 infection.

19. (canceled)

20. (canceled)

21. The method of claim 1,
(a) wherein said administering comprises intravenous administering; or
(b) wherein said second composition is administered: i) between 0.5 and 80 minutes after said first composition, or between about 1 and 20 minutes after said first composition.

22. (canceled)

23. The method of claim 1, further comprising: c) administering an agent, in said first or second composition, or present in a third composition, wherein said agent: i) increases the level of expression of said at least one anti-SARS-CoV-2 antibody or antigen-binding portion thereof, or ii) increases the length of time of said expression compared to when said agent is not administered to said subject.

24. The method of claim 23, wherein
(a) said agent is present in said first composition,
(b) said agent is present in said third composition, and is administered at least one hour prior to said first composition:
(c) said agent is a dexamethasone fatty acid ester:
(d) said agent is dexamethasone fatty acid ester having the following Formula: [chemical structure]
wherein R¹ is C₅-C₂₃ alkyl or C₅-C₂₃ alkenyl; or
(e) wherein said agent is present in said first, second, or third composition at a concentration of 0.01-35 mg/ml.

25.-28. (canceled)

29. The method of claim 1,
(a) wherein said subject has lung, cardiovascular, and/or multi-organ inflammation,
(b) wherein said subject is on a ventilator: or
(c) wherein said subject is a human.

30. (canceled)

31. The method of claim 1,
(a) wherein said first or second compositions further comprise a physiologically tolerable buffer or intravenous solution; or
(b) wherein said first or second compositions further comprise lactated Ringer's solution or saline solution.

32. (canceled)

33. The method of claim 1, wherein said first compositions comprise liposomes comprising said polycationic structures, wherein said liposomes further comprising one or more macrophage targeting moieties selected from the group consisting of: mannose moieties, maleimide moieties, a folate receptor ligand, folate, folate receptor antibody or fragment thereof, formyl peptide receptor ligands, N-formyl-Met-Leu-Phe, tetrapeptide Thr-Lys-Pro-Arg, galactose, and lactobionic acid.

34. The method of claim 1,
(a) wherein said one or more non-viral expression vectors comprise plasmids;
(b) wherein said plurality of one or more non-viral expression vectors are not attached to, or encapsulated in, any delivery agent;
(c) wherein 0.05-60 mg/mL of said expression vectors are present in said second composition; or
(d) wherein said polycationic structures comprise cationic liposomes which are present at a concentration of 0.5-100 mM in said first composition.

35.-37. (canceled)

38. The method of claim 1, wherein said subject is a human, wherein:
i) an amount of said first composition is administered such that said human receives a dosage of 2-50 mg/kg of said polycationic structures; and/or
ii) an amount of said second composition is administered such that said human receives a dosage of 0.05-60 mg/kg of said expression vectors.

39. The method of claim 1, wherein said polycationic structures comprise cationic liposomes, wherein said cationic liposomes further comprise a lipid bi-layer integrating peptide and/or a target peptide.

40. The method of claim 39, wherein: i) said lipid bi-layer integrating peptide is selected from the group consisting of: surfactant protein D (SPD), surfactant protein C (SPC), surfactant protein B (SPB), and surfactant protein A (SPA), and ii) said target peptide is selected from the group consisting of: microtubule-associated sequence (MTAS), nuclear localization signal (NLS), ER secretion peptide, ER retention peptide, and peroxisome peptide.

41. The method of claim 1, wherein steps a) and b) are repeated between 1 and 60 days after the initial step b).

42. The method of claim 1, wherein each of said non-viral expression vectors comprise between 5,500 and 30,000 nucleic acid base pairs.

43. The method of claim 1, further comprising: administering an anti-viral agent, an anti-inflammatory, or anticoagulant to said subject.

44. The method of claim 43, wherein said anti-viral agent comprises Remdesivir or a protein comprising at least part of the ACE2 receptor.

45. (canceled)

46. The method of claim 1, wherein said one or more non-viral expression vectors are CPG-free or CPG-reduced.

47. A system comprising:
a) a first container;
b) a first composition inside said first container and comprising polycationic structures, wherein said first composition is free, or essentially free, of nucleic acid molecules;
c) a second container; and
d) a second composition inside said second container and comprising a plurality of one or more non-viral expression vectors that encode
(i) at least one anti-SARS-CoV-2 antibody or antigen-binding portion thereof, or an ACE2 protein; or
(ii) at least three different antibodies or antigen-binding portions thereof.

48.-51. (canceled)

52. A method of simultaneously expressing at least three different antibodies, or antigen binding portions thereof, in a subject comprising:
a) administering a first composition to a subject, wherein said first composition comprises polycationic structures, and wherein said first composition is free, or essentially free, of nucleic acid molecules; and
b) administering a second composition to said subject after administering said first composition, wherein said second composition comprises a plurality of one or more non-viral expression vectors that encode at least three different antibodies or antigen-binding portions thereof, and
wherein, as a result of said administering said first and second compositions, said at least three different antibodies, or antigen-binding portions thereof, are simultaneously expressed in said subject.

53.-103. (canceled)

104. A method comprising:
a) administering a first composition to a subject, wherein said first composition comprises polycationic structures, and wherein said first composition is free, or essentially free, of nucleic acid molecules; and
b) administering a second composition to said subject after administering said first composition, wherein said second composition comprises a plurality of non-viral expression vectors that encode human growth hormone (hGH) and/or hGH linked to a half-life extending peptide (hGH-ext), and
wherein, as a result of said administering said first and second compositions, said hGH is expressed in said subject.

105.-139. (canceled)
